(19) United States
(12) Patent Application Publication
(10) Pub. No.: US 2013/0078216 A1
(43) Pub. Date: Mar. 28, 2013

(54) LIVER TARGETING MOLECULES

(71) Applicants: Grainne Dunlevy, Cambridge (GB); Steven Holmes, Cambridge (GB); Zhi Hong, Durham, NC (US); Armin Sepp, Cambridge (GB); Adam Walker, Cambridge, PA (US)

(72) Inventors: Grainne Dunlevy, Cambridge (GB); Steven Holmes, Cambridge (GB); Zhi Hong, Durham, NC (US); Armin Sepp, Cambridge (GB); Adam Walker, Cambridge, PA (US)

(21) Appl. No.: 13/522,407

(22) PCT Filed: Jan. 13, 2011
(86) PCT No.: PCT/EP2011/050420

§ 371 Date: Jul. 16, 2012

Related U.S. Application Data
(60) Provisional application No. 61/294,942, filed on Jan. 14, 2010.

(51) Int. Cl. A61K 39/395; C07K 16/28

(52) U.S. Cl. CPC A61K 39/39541; C07K 16/28
USPC 424/85.4; 424/135.1; 530/387.3; 530/391.7; 536/23.53; 435/320.1; 435/69.6; 435/328; 435/252.33; 435/254.23

(57) ABSTRACT

The present invention relates to molecules that can be targeted to the liver. These liver targeting molecules (e.g.fusions and conjugates) comprise proteins, antibodies or antibody fragments such as immunoglobulin (antibody) single variable domains (dAbs) and also one or more additional molecules which it is desired to deliver to the liver such as interferons. The invention further relates to uses, formulations, compositions and devices comprising such liver targeting molecules. The invention also relates to immunoglobulin (antibody) single variable domains which bind to hepatocytes.

[0001] The present invention relates to molecules that can be targeted to the liver. These liver targeting molecules (e.g.fusions and conjugates) comprise proteins, antibodies or antibody fragments such as immunoglobulin (antibody) single variable domains (dAbs) and also one or more additional molecules which it is desired to deliver to the liver such as interferons. The invention further relates to uses, formulations, compositions and devices comprising such liver targeting molecules. The invention also relates to immunoglobulin (antibody) single variable domains which bind to hepatocytes.

### BACKGROUND OF THE INVENTION

[0002] Liver disease is a term describing a number of disease states including (but not limited to) the following:

[0003] 1.) Hepatitis, an inflammation of the liver caused in many cases by viral infection;

[0004] 2.) Cirrhosis, which involves fibroid deposition following tissue remodelling in the liver typically after viral infection or exposure to liver-toxic agents such as alcohol; and

[0005] 3.) Liver cancer, including primary hepatocellular carcinoma (HCC) and secondary tumour formation following metastasis of tumours at extra-hepatic sites.

[0006] Chronic infection with hepatitis C virus (HCV) is one of the major causes of cirrhosis and HCC. Global burden of HCV related disease is high with endemic infection in many countries. According to WHO figures an estimated 170 million people (3% of the global population) are infected with an estimated 3-4 million new cases annually (reviewed, for example, by Soriano, Peters and Zeuzem. Clinical Infectious Diseases. 2009; 48:313-20). Approximately 70% of infected individuals develop chronic infection with 20% of this group progressing to cirrhosis within a 20 year period. Liver cirrhosis following HCV infection is also associated with increased risk of developing liver cancer and it is estimated that annually 3-4% of patients with HCV induced cirrhosis go on to develop HCC (reviewed, for example, by Webster et al. Lancet Infect Dis 2009; 9:108-17).

[0007] Current standard in HCV therapy consists of combination regimens of pegylated interferon-α (PEG-IFN-α) and the nucleoside analogue Ribavirin (RBV). The main aim of anti HCV therapy is to produce sustained virologic response (SVR) currently defined as failure to detect HCV RNA in peripheral blood, using highly sensitive PCR detection methods, 24 weeks after treatment ends. SVR is currently achievable in a large proportion of patients infected with HCV genotypes 2 and 3 using current standard therapy, however the proportion of patients infected with genotypes 1 and 4 achieving SVR is typically much lower (reviewed, for example, in Deutsch and Hadziyannis. Journal of Viral Hepatitis 2008; 15:2-11) due in part to compliance issues as a result of side effects associated with PEG-IFN-α treatment. Alternatives to IFN therapy are currently being developed and typically involve inhibition of viral targets (protease, polymerase and helicase proteins) with small molecule compounds.

[0008] However issues with viral resistance and side effects have hampered development and widespread use of these compounds in many cases. IFN therapy, on the other hand, is not associated with viral resistance therefore novel IFN-based therapeutics with better efficacy and tolerability profiles could represent an opportunity to significantly improve upon the current standard of HCV therapy.

[0009] IFN associated side effects are thought to be due in part to induction of IFN-responsive genes following systemic exposure to IFN-a (reviewed, for example, in Myint et al. Metab Brain Dis 2009; 24:55-(68). Since the primary site of HCV infection is in the liver (specifically hepatocytes) it could therefore be of potential benefit to avoid exposure of peripheral blood cells to IFN, thereby potentially reducing side effects associated with IFN therapy. IFN-α specifically targeted to the liver may also exhibit improved antiviral efficacy as a biproduct of directing the therapeutic molecule to the site of HCV infection, thus increasing concentrations at the hepatocyte,which could in turn allow treatment with lower total doses of IFN enabling dose intensification. In animal models of human hepatitis B virus (HBV) infection IFN-β directed to the liver specific antigen Asialoglycoprotein receptor (ASGPR) displayed significantly improved antiviral efficacy in vivo (Eto & Takahashi Nature Medicine 1999; 5:577-581).

[0010] The asialglycoprotein receptor binds asialoglycoproteins i.e. glycoproteins from which a sialic acid residue has been removed to expose one or more (typically) galactose residues. The ASGPR is expressed on liver cells which remove target glycoproteins from the circulation. The ASGPR molecule is hetero-oligomeric comprising two different subunits: H1 and H2.

[0011] There is thus a need to provide new therapeutic compositions which target molecules, including IFN, to the liver to treat and/or prevent liver diseases.

[0012] An antibody based approach to target molecules, including IFN for HCV treatment, may therefore provide a method of developing novel therapeutics with improved efficacy and tolerability profiles for use in treatment of a range of liver diseases.

### SUMMARY OF THE INVENTION

[0013] The present invention provides compositions and methods for targeting molecules to hepatocytes in the liver.

[0014] In one embodiment the invention a provides liver targeting composition which comprise a single molecule (e.g., as a single fusion or conjugate) which comprises (a) a ligand such as an antibody or an antibody fragment (e.g., a domain antibody (dAb)) which binds to liver cells, for example liver hepatocytes (e.g. to the ASGPR receptor on hepatocytes) and also (b) one or more therapeutic molecules for delivery to the liver. In particular the invention provides a liver targeting composition comprising a single molecule (such as a fusion or conjugate) comprising a ligand, such as an antibody or an antibody fragment (e.g. a domain antibody) which binds to the H1 subunit of ASGPR.

[0015] These liver targeting compositions can also comprise further proteins or polypeptides e.g. half life extending proteins or polypeptides e.g., a further dAb e.g., a dAb which binds to serum albumin or e.g., polyethyleneglygol PEG. These may be fused or conjugated to the single molecule, and may be fused or conjugated to the ligand, or to the therapeutic molecule, or to both the ligand and the therapeutic molecule. Methods of extending and/or measuring the in vivo half-life of molecules are known to those skilled in the art and are described in detail in, for example, WO2006/059110 and WO2008/096158.

[0016] In one embodiment the liver targeting composition comprises an antibody fragment (a) which is a single immunoglobulin variable domain (domain antibody (dAb)) which binds specifically to a hepatocyte e.g., to the ASGPR receptor on the hepatocytes, especially to the H1 subunit thereof. The dAb can be a human Vh or a human V Kappa. The dAb can also bind to a human and/or mouse ASGPR receptor.

[0017] Compositions of the invention also include ligands, for example a single immunoglobulin variable domain (dAb) which binds specifically to a hepatocyte e.g. to the ASGPR receptor on hepatocytes. For example the dAb provided by the invention can be a human Vh or a human V Kappa. The dAb can also bind to a human and/or mouse ASGPR receptor and/or ASGPR receptors from other animals.

[0018] In one embodiment, the dAb which binds to the ASGPR receptor on hepatocytes binds to human and/or mouse ASGPR, with high affinity as measured by Biacore [using the HBS-P buffer system (0.01M Hepes, pH7.4, 0.15M NaCl, 0.05% surfactant P20)] in the region of 1 pM to about 100 nM, for example about 1 pM to about 10 nM. or example about 1 pM to about 1 nM. In one embodiment the dAb will bind to both the human and to the mouse ASGPR with high affinity, as aforementioned.

[0019] For example, the dAb provided by the invention which specifically binds to the ASGPR receptor on hepatocytes can be one which comprises an amino acid sequence that is at least 80% identical (e.g., 85%, 90%, 95% or 100% identical) to the amino acid sequence encoded by the nucleotide sequences identified as: (anti human ASGPR VH dAbs) DOM26h-1 (Seq ID No: 155); DOM26h-10 (Seq ID No: 157); DOM26h-100 (Seq ID No: 159); DOM26h-101 (Seq ID No: 161); DOM26h-102 (Seq ID No: 163); DOM26h-103 (Seq ID No: 165); DOM26h-104 (Seq ID No: 167); DOM26h-105 (Seq ID No: 169); DOM26h-106 (Seq ID No: 171); DOM26h-107 (Seq ID No: 173); DOM26h-108 (Seq ID No: 175); DOM26h-109 (Seq ID No: 177); DOM26h-11 (Seq ID No: 179); DOM26h-110 (Seq ID No: 181); DOM26h-111 (Seq ID No: 183); DOM26h-112 (Seq ID No: 185); DOM26h-113 (Seq ID No: 187); DOM26h-114 (Seq ID No: 189); DOM26h-115 (Seq ID No: 191); DOM26h-116 (Seq ID No: 193); DOM26h-117 (Seq ID No: 195); DOM26h-118 (Seq ID No: 197); DOM26h-119 (Seq ID No: 199); DOM26h-12; (Seq ID No: 201) DOM26h-120 (Seq ID No: 203); DOM26h-121 (Seq ID No: 205); DOM26h-122 (Seq ID No: 207); DOM26h-123 (Seq ID No: 209); DOM26h-124; (Seq ID No: 211); DOM26h-125 (Seq ID No: 213); DOM26h-126 (Seq ID No: 215); DOM26h-127 (Seq ID No: 217); DOM26h-128 (Seq ID No: 219); DOM26h-129 (Seq ID No: 221); DOM26h-130 (Seq ID No: 223); DOM26h-131 (Seq ID No: 225); DOM26h-132 (Seq ID No: 227); DOM26h-133 (Seq ID No: 229); DOM26h-134 (Seq ID No: 231); DOM26h-135 (Seq ID No: 233); DOM26h-136 (Seq ID No: 235); DOM26h-137 (Seq ID No: 237); DOM26h-138 (Seq ID No: 239); DOM26h-139 (Seq ID No: 241); DOM26h-140 (Seq ID No: 243); DOM26h-141 (Seq ID No: 245); DOM26h-142 (Seq ID No: 247); DOM26h-143 (Seq ID No: 249); DOM26h-144 (Seq ID No: 251); DOM26h-145 (Seq ID No: 253); DOM26h-146 (Seq ID No: 255); DOM26h-147 (Seq ID No: 257); DOM26h-148 (Seq ID No: 259); DOM26h-149 (Seq ID No: 261); DOM26h-15 (Seq ID No: 263); DOM26h-150 (Seq ID No: 265); DOM26h-151 (Seq ID No: 267); DOM26h-152 (Seq ID No: 269); DOM26h-153 (Seq ID No: 271); DOM26h-154 (Seq ID No: 273); DOM26h-155 (Seq ID No: 275); DOM26h-156 (Seq ID No: 277); DOM26h-157 (Seq ID No: 279); DOM26h-158 (Seq ID No: 281); DOM26h-159 (Seq ID No: 283); DOM26h-159-1 (Seq ID No: 285); DOM26h-159-2 (Seq ID No: 287); DOM26h-159-3 (Seq ID No: 289); DOM26h-159-4 (Seq ID No: 291); DOM26h-159-5 (Seq ID No: 293); DOM26h-160 (Seq ID No: 295); DOM26h-168 (Seq ID No: 297); DOM26h-169 (Seq ID No: 299); DOM26h-17 (Seq ID No: 301); DOM26h-170 (Seq ID No: 303); DOM26h-171 (Seq ID No: 305); DOM26h-172 (Seq ID No: 307); DOM26h-173 (Seq ID No: 309); DOM26h-174 (Seq ID No: 311); DOM26h-175 (Seq ID No: 313); DOM26h-176 (Seq ID No: 315); DOM26h-177 (Seq ID No: 317); DOM26h-178 (Seq ID No: 319); DOM26h-179 (Seq ID No: 321); DOM26h-180 (Seq ID No: 323); DOM26h-181 (Seq ID No: 325); DOM26h-182 (Seq ID No: 327); DOM26h-183 (Seq ID No: 329); DOM26h-184 (Seq ID No: 331); DOM26h-185 (Seq ID No: 333); DOM26h-186 (Seq ID No: 335); DOM26h-187 (Seq ID No: 337); DOM26h-188 (Seq ID No: 339); DOM26h-189 (Seq ID No: 341); DOM26h-19 (Seq ID No: 343); DOM26h-190 (Seq ID No: 345); DOM26h-191 (Seq ID No: 347); DOM26h-192 (Seq ID No: 349); DOM26h-193 (Seq ID No: 351); DOM26h-194 (Seq ID No: 353); DOM26h-195 (Seq ID No: 355); DOM26h-196 (Seq ID No: 357); DOM26h-197 (Seq ID No: 359); DOM26h-198 (Seq ID No: 361); DOM26h-199 (Seq ID No: 363); DOM26h-2 (Seq ID No: 365); DOM26h-20 (Seq ID No: 367); DOM26h-200 (Seq ID No: 369); DOM26h-201 (Seq ID No: 371); DOM26h-202 (Seq ID No: 373); DOM26h-203 (Seq ID No: 375); DOM26h-204 (Seq ID No: 377); DOM26h-205 (Seq ID No: 379); DOM26h-206 (Seq ID No: 381); DOM26h-207 (Seq ID No: 383); DOM26h-208 (Seq ID No: 385); DOM26h-209 (Seq ID No: 387); DOM26h-21 (Seq ID No: 389); DOM26h-210 (Seq ID No: 391); DOM26h-211 (Seq ID No: 393); DOM26h-212 (Seq ID No: 395); DOM26h-213 (Seq ID No: 397); DOM26h-214 (Seq ID No: 399); DOM26h-215 (Seq ID No: 401); DOM26h-216 (Seq ID No: 403); DOM26h-217 (Seq ID No: 405); DOM26h-218 (Seq ID No: 407); DOM26h-219 (Seq ID No: 409); DOM26h-22 (Seq ID No: 411); DOM26h-220 (Seq ID No: 413); DOM26h-221 (Seq ID No: 415); DOM26h-222 (Seq ID No: 417); DOM26h-223 (Seq ID No: 419); DOM26h-23 (Seq ID No: 421); DOM26h-24 (Seq ID No: 423); DOM26h-29-1 (Seq ID No: 425); DOM26h-4 (Seq ID No: 427); DOM26h-41 (Seq ID No: 429); DOM26h-42 (Seq ID No: 431); DOM26h-43 (Seq ID No: 433); DOM26h-44 (Seq ID No: 435); DOM26h-45 (Seq ID No: 437); DOM26h-46 (Seq ID No: 439); DOM26h-47 (Seq ID No: 441); DOM26h-48 (Seq ID No: 443); DOM26h-49 (Seq ID No: 445); DOM26h-50 (Seq ID No: 447); DOM26h-51 (Seq ID No: 449); DOM26h-52 (Seq ID No: 451); DOM26h-53 (Seq ID No: 453); DOM26h-54 (Seq ID No: 455); DOM26h-55 (Seq ID No: 457); DOM26h-56 (Seq ID No: 459); DOM26h-57 (Seq ID No: 461); DOM26h-58 (Seq ID No: 463); DOM26h-59 (Seq ID No: 465); DOM26h-60 (Seq ID No: 467); DOM26h-61 (Seq ID No: 469); DOM26h-62 (Seq ID No: 471); DOM26h-63 (Seq ID No: 473); DOM26h-64 (Seq ID No: 475); DOM26h-65 (Seq ID No: 477); DOM26h-66 (Seq ID No: 479); DOM26h-67 (Seq ID No: 481); DOM26h-68 (Seq ID No: 483); DOM26h-69 (Seq ID No: 485); DOM26h-70 (Seq ID No: 487); DOM26h-71 (Seq ID No: 489); DOM26h-72 (Seq ID No: 491); DOM26h-73 (Seq ID No: 493); DOM26h-74 (Seq ID No: 495); DOM26h-75 (Seq ID No: 497); DOM26h-76 (Seq ID No: 499); DOM26h-77 (Seq ID No: 501); DOM26h-78 (Seq ID No: 503); DOM26h-79 (Seq ID No: 505); DOM26h-80 (Seq ID No: 507); DOM26h-81 (Seq ID No: 509); DOM26h-82 (Seq ID No: 511); DOM26h-83 (Seq ID No: 513); DOM26h-84 (Seq ID No: 515); DOM26h-85 (Seq ID No: 517); DOM26h-86 (Seq ID No: 519); DOM26h-87 (Seq ID No: 521); DOM26h-88 (Seq ID No: 523); DOM26h-89 (Seq ID No: 525); DOM26h-90 (Seq ID No: 527); DOM26h-91 (Seq ID No: 529); DOM26h-92 (Seq ID No: 531); DOM26h-93 (Seq ID No: 533); DOM26h-94 (Seq ID No: 535); DOM26h-95 (Seq ID No: 537); DOM26h-96 (Seq ID No: 539); DOM26h-97 (Seq ID No: 541); DOM26h-98 (Seq ID No: 543); DOM26h-99 (Seq ID No: 545); DOM26h-99-1 (Seq ID No: 547); DOM26h-99-2 (Seq ID No: 549); (anti human ASGPR Vκ Clones) DOM26h-161 (Seq ID No: 551); DOM26h-162 (Seq ID No: 553); DOM26h-163 (Seq ID No: 555); DOM26h-164 (Seq ID No: 557); DOM26h-165 (Seq ID No: 559); DOM26h-166 (Seq ID No: 561); DOM26h-167 (Seq ID No: 563); DOM26h-224 (Seq ID No: 565); DOM26h-25 (Seq ID No: 567); DOM26h-26 (Seq ID No: 569); DOM26h-27 (Seq ID No: 571); DOM26h-28 (Seq ID No: 573); DOM26h-29 (Seq ID No: 575); DOM26h-30 (Seq ID No: 577); DOM26h-31 (Seq ID No: 579); DOM26h-32 (Seq ID No: 581); DOM26h-33 (Seq ID No: 583); DOM26h-34 (Seq ID No: 585); DOM26h-35 (Seq ID No: 587); DOM26h-36 (Seq ID No: 589); DOM26h-37 (Seq ID No: 591); DOM26h-38 (Seq ID No: 593); DOM26h-39 (Seq ID No: 595); DOM26h-40 (Seq ID No: 597); DOM26h-6 (Seq ID No: 599); DOM26h-8 (Seq ID No: 601); DOM26h-9 (Seq ID No: 603).

[0020] In another embodiment, the dAb provided by the invention which specifically binds to the ASGPR receptor on hepatocyes may be one which comprises an amino acid sequence that is at least 80% identical (e.g. 85%, 90%, 95% or 100% identical) to the affinity-matured dAb clone sequences encoded by the nucleotide sequences identified in FIG. 32 as DOM26h-161-84 (Seq ID No: 867); DOM26h-161-86 (Seq ID No: 869); DOM26h-161-87 (Seq ID No: 871); DOM26h-196-61 (Seq ID No: 873); DOM26h-210-2 (Seq ID No: 875); DOM26h-220-1 (Seq ID No: 877); or DOM26h-220-43 (Seq ID No: 879).

[0021] In another example, the dAb which binds to the ASGPR receptor on hepatocytes is one which comprises an amino acid sequence that is at least 80% identical (e.g. 85%, 90%, 95% or 100% identical) to the amino acid sequence encoded by the nucleotide sequences identified as: (anti mouse ASGPR VH dAbs) DOM26m-10 (Seq ID No: 605); DOM26m-13 (Seq ID No: 607); DOM26m-16 (Seq ID No: 609); DOM26m-165 (Seq ID No: 611); DOM26m-17 (Seq ID No: 613); DOM26m-27 (Seq ID No: 615); DOM26m-28 (Seq ID No: 617); DOM26m-29 (Seq ID No: 619); DOM26m-30 (Seq ID No: 621); DOM26m-31 (Seq ID No: 623); DOM26m-32 (Seq ID No: 625); DOM26m-33 (Seq ID No: 627); DOM26m-33-1 (Seq ID No: 629); DOM26m-33-10 (Seq ID No: 631); DOM26m-33-11 (Seq ID No: 633); DOM26m-33-12 (Seq ID No: 635); DOM26m-33-2 (Seq ID No: 637); DOM26m-33-3 (Seq ID No: 639); DOM26m-33-4 (Seq ID No: 641); DOM26m-33-5 (Seq ID No: 643); DOM26m-33-6 (Seq ID No: 645); DOM26m-33-7 (Seq ID No: 647); DOM26m-33-8 (Seq ID No: 649); DOM26m-33-9 (Seq ID No: 651); DOM26m-34 (Seq ID No: 653); DOM26m-35 (Seq ID No: 655); DOM26m-36 (Seq ID No: 657); DOM26m-37 (Seq ID No: 659); DOM26m-38 (Seq ID No: 661); DOM26m-39 (Seq ID No: 663); DOM26m-4 (Seq ID No: 665); DOM26m-40 (Seq ID No: 667); DOM26m-41 (Seq ID No: 669); DOM26m-42 (Seq ID No: 671); DOM26m-43 (Seq ID No: 673); DOM26m-44 (Seq ID No: 675); DOM26m-45 (Seq ID No: 677); DOM26m-46 (Seq ID No: 679); DOM26m-47 (Seq ID No: 681); DOM26m-48 (Seq ID No: 683); DOM26m-52 (Seq ID No: 685); DOM26m-52-1 (Seq ID No: 687); DOM26m-52-2 (Seq ID No: 689); DOM26m-52-3 (Seq ID No: 691); DOM26m-52-4 (Seq ID No: 693); DOM26m-52-5 (Seq ID No: 695); DOM26m-52-6 (Seq ID No: 697); DOM26m-52-7 (Seq ID No: 699); DOM26m-6 (Seq ID No: 701); DOM26m-60 (Seq ID No: 703); DOM26m-61-1 (Seq ID No: 705); DOM26m-61-2 (Seq ID No: 707); DOM26m-61-3 (Seq ID No: 709); DOM26m-61-4 (Seq ID No: 711); DOM26m-61-5 (Seq ID No: 713); DOM26m-61-6 (Seq ID No: 715); DOM26m-7 (Seq ID No: 717); DOM26m-73 (Seq ID No: 719); DOM26m-74 (Seq ID No: 721); DOM26m-75 (Seq ID No: 723); DOM26m-76 (Seq ID No: 725); DOM26m-77 (Seq ID No: 727); DOM26m-78 (Seq ID No: 729); DOM26m-79 (Seq ID No: 731); DOM26m-8 (Seq ID No: 733); DOM26m-80 (Seq ID No: 735); DOM26m-81 (Seq ID No: 737); DOM26m-82 (Seq ID No: 739); DOM26m-83 (Seq ID No: 741); DOM26m-9 (Seq ID No: 743); (anti mouse ASGPR Vκ dAbs) DOM26m-1 (Seq ID No: 745); DOM26m-100 (Seq ID No: 747); DOM26m-101 (Seq ID No: 749); DOM26m-102 (Seq ID No: 751); DOM26m-103 (Seq ID No: 753); DOM26m-106 (Seq ID No: 755); DOM26m-108 (Seq ID No: 757); DOM26m-109 (Seq ID No: 759); DOM26m-109-1 (Seq ID No: 761); DOM26m-109-2 (Seq ID No: 763); DOM26m-12 (Seq ID No: 765); DOM26m-18 (Seq ID No: 767); DOM26m-19 (Seq ID No: 769); DOM 26m-2 (Seq ID No: 771); DOM26m-20 (Seq ID No: 773); DOM26m-20-1 (Seq ID No: 775); DOM26m-20-2 (Seq ID No: 777); DOM26m-20-3 (Seq ID No: 779); DOM26m-20-4 (Seq ID No: 781); DOM26m-20-5 (Seq ID No: 783); DOM26m-20-6 (Seq ID No: 785); DOM26m-22 (Seq ID No: 787); DOM26m-23 (Seq ID No: 789); DOM26m-24 (Seq ID No: 791); DOM26m-25 (Seq ID No: 793); DOM26m-26 (Seq ID No: 795); DOM26m-3 (Seq ID No: 797); DOM26m-50 (Seq ID No: 799); DOM26m-50-1 (Seq ID No: 801); DOM26m-50-2 (Seq ID No: 803); DOM26m-50-3 (Seq ID No: 805); DOM26m-50-4 (Seq ID No: 807); DOM26m-50-5 (Seq ID No: 809); DOM26m-50-6 (Seq ID No: 811); DOM26m-51 (Seq ID No: 813); DOM26m-53 (Seq ID No: 815); DOM26m-54 (Seq ID No: 817); DOM26m-55 (Seq ID No: 819); DOM26m-56 (Seq ID No: 821); DOM26m-57 (Seq ID No: 823); DOM26m-58 (Seq ID No: 825); DOM26m-59 (Seq ID No: 827); DOM26m-61 (Seq ID No: 829); DOM26m-63 (Seq ID No: 831); DOM26m-64 (Seq ID No: 833); DOM26m-66 (Seq ID No: 835); DOM26m-69 (Seq ID No: 837); DOM26m-85 (Seq ID No: 839); DOM26m-86 (Seq ID No: 841); DOM26m-87 (Seq ID No: 843); DOM26m-89 (Seq ID No: 845); DOM26m-90 (Seq ID No: 847); DOM26m-91 (Seq ID No: 849); DOM26m-92 (Seq ID No: 851); DOM26m-93 (Seq ID No: 853); DOM26m-94 (Seq ID No: 855); DOM26m-95 (Seq ID No: 857); DOM26m-96 (Seq ID No: 859); DOM26m-97 (Seq ID No: 861); DOM26m-98 (Seq ID No: 863); DOM26m-99 (Seq ID No: 865).

[0022] In an embodiment the ligand e.g. the dAb, can be one which competes for binding to the ASGPR receptor with any one of the DOM 26 dAbs described herein (with an amino acid sequence shown in FIGS. 15, 16, 19 and 20).

[0023] In yet another aspect there is provided a dAb which binds to ASGPR comprising at least one CDR selected from the group consisting of: CDR1, CDR2, and CDR3, wherein the CDR1, CDR2, or CDR3 is at least 80% identical (e.g. 85%, 90%, 95% or 100% identical) to a CDR1, CDR2, or CDR3 sequence in any one of the amino DOM 26 amino acid sequences as described herein. The CDRs can be identified in the amino acid sequences as follows: V kappa sequences: CDR1 is residues 24-34, CDR2 is residues 50-56, CDR3 is residues 89-97; for V H sequences: CDR1 is residues 31-35, CDR2 is residues 50-65, CDR3 is residues 95-102.

[0024] In one embodiment, the dAbs of the present invention show cross-reactivity between human ASGPR and ASGPR from another species such as mouse, dog or cynomolgus macaque. In one embodiment, the dAbs of the present invention show cross-reactivity between human and mouse ASGPR. In this embodiment, the variable domains specifically bind human and mouse ASGPR. In one embodiment the invention provides a variable domain which is cross reactive for human and mouse ASGPR and which is an amino acid sequence selected from: DOM 26m-52, DOM 26h-99, DOM 26h-161, DOM 26h-163, DOM 26h-186, DOM 26h-196, DOM 26h-210, and DOM 26h-220 or an amino acid sequence which is at least 80% identical (e.g. 85%, 90%, 95% or 100%) identical to an amino acid sequence selected from: DOM 26m-52, DOM 26h-99, DOM 26h-161, DOM 26h-163, DOM 26h-186, DOM 26h-196, DOM 26h-210, and DOM 26h-220.

[0025] As described above, cross-reactivity is particularly useful, since drug development typically requires testing of lead drug candidates in animal systems, such as mouse models, before the drug is tested in humans. The provision of a drug that can bind to a human protein as well as the species homologue such as the equivalent mouse protein allows one to test results in these systems and make side-by-side comparisons of data using the same drug. This avoids the complication of needing to find a drug that works against, for example, a mouse ASGPR and a separate drug that works against human ASGPR, and also avoids the need to compare results in humans and mice using non-identical or surrogate drugs.

[0026] In another embodiment the invention provides a liver targeting composition which comprise a single molecule (e.g. present as a single fusion or conjugate) which comprises (a) a dAb which binds to the ASGPR receptor on hepatocytes, e.g. any one of the ASGPR dAbs as described herein and also (b) one or more therapeutic molecules for delivery to the liver.

[0027] In one embodiment of the above the molecule (b) which it is desired to deliver to the liver can be an interferon, for example it can be interferon alpha 2, interferon alpha 5, interferon alpha 6, or Consensus interferon, or it can be a mutant or derivative of any of these which retains some interferon activity.

[0028] In another embodiment the present invention provides a composition which comprises any one of the liver targeting compositions as described herein, and also a further drug for delivery to the liver for example Ribavirin and/or a drug for systemic delivery. Such a composition can be a combined preparation for simultaneous, separate or sequential use in therapy, e.g to treat or prevent a liver disease or condition such as an inflammatory liver disease e.g. fibrosis or a viral liver disease e.g. Hepatitis (e.g. Hepatitis C), or Cirrhosis or liver cancer.

[0029] In one embodiment, the drug which it is desired to deliver to the liver may comprise one or more of the following: Nexavar® (also known as Sorafenib)—a small molecule used in the treatment of primary hepatocellular carcinoma; Erbitux® (also known as Cetuximab)—a monoclonal antibody used in the treatment of primary liver cancers, or bowel cancer metastases in the liver; Avastin® (also known as bevacizumab) and Herceptin® (also known as trastuzumab), which are used to treat bowel or breast cancer metastases respectively in the liver.

[0030] Nexavar could, for example, be conveniently chemically conjugated to an antibody or dAb or the like which binds to the ASGPR receptor. Erbitux®, Avastin® or Herceptin® containing-fusions could conveniently be prepared by fusing a nucleotide sequence encoding the Erbitux®, Avastin® or Herceptin® antibody with a nucleotide sequence encoding an antibody, dAb or the like which binds to the ASGPR receptor.

[0031] The therapeutic molecule(s) for delivery to the liver (e.g. interferon) when present as a fusion (or conjugate) with a liver targeting dAb can be linked to either the N-terminal or C-terminal of the dAb or at points within the dAb sequence. In one embodiment one or more interferon molecules e.g. interferon alpha 2 are present as a fusion (or conjugate) at the N terminal of the dAb.

[0032] An amino acid or chemical linker may also optionally be present joining the therapeutic molecule(s) for delivery to the liver (e.g. interferon) with the dAb. The linker can be for example a TVAAPR or TVAAPS linker sequence, a helical linker or it can be a gly-ser linker.

[0033] Alternatively the linker can be e.g. a PEG linker. The linker can also be a peptide linker, a linker containing a functionality such as a protease cleavage site, or a chelating group e.g. for attachment of a radioisotope or other imaging agent.

[0034] In certain embodiments, the dAbs, fusions (or conjugates) of the invention can comprise further molecules e.g. further peptides or polypeptides, such as half-life extending polypeptides (e.g. a dAb or antibody fragment which binds to serum albumin), or one or more PEG molecules.

[0035] As used herein, “fusion” refers to a fusion protein that comprises as one moiety a dAb that binds to hepatocytes (e.g. to the ASGPR on hepatocytes) and one or more further molecules which are therapeutic molecules which it is desired to deliver to the liver (e.g. interferon). The dAb that binds to hepatocytes (e.g. to the ASGPR on hepatocytes) and the therapeutic molecules are present as discrete parts (moieties) of a single continuous polypeptide chain. The dAb and the therapeutic molecules can be directly bonded to each other through a peptide bond or linked through a suitable amino acid, or peptide or polypeptide linker. Additional moieties e.g. peptides or polypeptides (e.g. third, fourth) and/or linker sequences, can be present as appropriate. The dAb can be in an N-terminal location, C-terminal location or it can be internal relative to the therapeutic molecules.

[0036] As used herein, “conjugate” refers to a composition comprising a dAb that binds to hepatocytes (e.g. to the ASGPR on hepatocytes) to which one or more therapeutic molecules for delivery to the liver are covalently or non-covalently bonded. The therapeutic molecule can be covalently bonded to the dAb directly or indirectly through a suitable linker moiety. The therapeutic molecule can be bonded to the dAb at any suitable position, such as the amino-terminus, the carboxyl-terminus or through suitable amino acid side chains (e.g., the 8 amino group of lysine, or thiol group of cysteine). Alternatively, the therapeutic molecule can be noncovalently bonded to the dAb directly (e.g., electrostatic interaction, hydrophobic interaction) or indirectly (e.g., through noncovalent binding of complementary binding partners (e.g., biotin and avidin), wherein one partner is covalently bonded to insulinotropic/incretin molecule and the complementary binding partner is covalently bonded to the dAb). The dAb can be in an N-terminal location, C-terminal location or it can be internal relative to the therapeutic molecule.

[0037] The invention also provides compositions comprising nucleic acids encoding the fusions described herein for example comprising any one of the nucleic acids encoding the DOM 26 dAbs as shown in FIGS. 13-14 and 17-18.

[0038] Also provided are host cells e.g. non-embryonic host cells e.g. prokaryotic or eukaryotic hosts cells such as bacterial host cells (e.g. E. coli) or or yeast host cells or mammalian cells that comprise these nucleic acids.

[0039] The invention further provides a method for producing a fusion protein of the present invention which method comprises maintaining a host cell such as those described above that comprises a recombinant nucleic acid and/or construct that encodes a fusion of the invention under conditions suitable for expression of said recombinant nucleic acid, whereby a fusion protein is produced.

[0040] The invention also provides pharmaceutical compositions comprising the compositions of the invention.

[0041] The invention further provides a composition of the invention for use in medicine, e.g. for use in the treatment or prevention of e.g. a liver disease or condition or disorder such as a viral liver disease (e.g. Hepatitis e.g. Hepatitis C), cirrhosis, or liver cancer, and which comprises administering to said individual a therapeutically effective amount of a composition of the invention.

[0042] The invention also provides a method for treating (therapeutically or prophylactically) a patient or subject having a disease or disorder, such as those described herein e.g. a liver disease or condition or disorder such as a viral liver disease (e.g. Hepatitis e.g. Hepatitis C), cirrhosis, or liver cancer, and which comprises administering to said individual a therapeutically effective amount of a composition of the invention.

[0043] The compositions e.g. pharmaceutical compositions, of the invention may be administered alone or in combination with other molecules or moieties e.g. polypeptides, therapeutic proteins and/or molecules (e.g., other proteins (including antibodies), peptides, or small molecule drugs.

[0044] The invention also provides compositions of the invention for use in the treatment of a liver disease or condition or disorder such as a viral liver disease (e.g. Hepatitis e.g. Hepatitis C), cirrhosis, or liver cancer.

[0045] The invention also provides for use of a composition of the invention in the manufacture of a medicament for treatment of a liver disease or condition or disorder such as a viral liver disease (e.g. Hepatitis e.g. Hepatitis C), cirrhosis, or liver cancer.

[0046] The invention also relates to use of any of the compositions described herein for use in therapy, diagnosis or prophylaxis of a liver disease or condition such as a viral liver disease (e.g. Hepatitis e.g. Hepatitis C), cirrhosis, or liver cancer disease or disorder. The invention also relates to prophylactic use of any of the compositions described herein after infection with a liver infecting blood borne pathogen.

[0047] The compositions of the invention, e.g. the dAb component of the composition, can be further formatted to have a larger hydrodynamic size to further extend the half life, for example, by attachment of a PEG group, serum albumin, transferrin, transferrin receptor or at least the transferrin-binding portion thereof, an antibody Fc region, or by conjugation to an antibody domain. For example, the dAb that binds serum albumin can be formatted as a larger antigen-binding fragment of an antibody (e.g., formatted as a Fab, Fab′, F(ab)₂, F(ab′)₂, IgG, scFv).

[0048] In other embodiments of the invention described throughout this disclosure, instead of the use of a “dAb” in a fusion of the invention, it is contemplated that the skilled addressee can use a domain that comprises the CDRs of a dAb that binds specifically to hepatocytes e.g. the ASGPR receptor on hepatocytes (e.g., the CDRs can be grafted onto a suitable protein scaffold or skeleton, eg an affibody, an SpA scaffold, an LDL receptor class A domain or an EGF domain). The disclosure as a whole is to be construed accordingly to provide disclosure of such domains in place of a dAb.

[0049] In certain embodiments, the invention provides a composition according to the invention that comprises a dual-specific ligand or multi-specific ligand that comprises a first dAb according to the invention that binds hepatocytes (e.g. the ASGPR receptor on hepatocytes) and a second dAb that has the same or a different binding specificity from the first dAb and optionally in the case of multi-specific ligands further dAbs. The second dAb (or further dAbs) may optionally bind a different target.

[0050] Thus, in one aspect, the invention provides the compositions of the invention for delivery by parenteral administration e.g. by subcutaneous, intramuscular or intravenous injection, inhalation, nasal delivery, transmucossal delivery, oral delivery, delivery to the GI tract of a patient, rectal delivery or ocular delivery. In one aspect, the invention provides the use of the compositions of the invention in the manufacture of a medicament for delivery by subcutaneous injection, inhalation, intravenous delivery, nasal delivery, transmucossal delivery, oral delivery, delivery to the GI tract of a patient, rectal delivery, transdermal or ocular delivery.

[0051] In one aspect, the invention provides a method for delivery to a patient by subcutaneous injection, pulmonary delivery, intravenous delivery, nasal delivery, transmucossal delivery, oral delivery, delivery to the GI tract of a patient, rectal or ocular delivery, wherein the method comprises administering to the patient a pharmaceutically effective amount of a fusion or conjugate of the invention.

[0052] In one aspect, the invention provides an oral, injectable, inhalable, or nebulisable formulation comprising a fusion or conjugate of the invention.

[0053] The formulation can be in the form of a tablet, pill, capsule, liquid or syrup.

[0054] The term “subject” or “individual” is defined herein to include animals such as mammals, including, but not limited to, primates (e.g., humans), cows, sheep, goats, horses, dogs, cats, rabbits, guinea pigs, rats, mice or other bovine, ovine, equine, canine, feline, rodent or murine species.

[0055] The invention also provides a kit for use in administering compositions according to the invention to a subject (e.g., human patient), comprising a composition of the invention, a drug delivery device and, optionally, instructions for use. The composition can be provided as a formulation, such as a freeze dried formulation or a slow release formulation. In certain embodiments, the drug delivery device is selected from the group consisting of a syringe, an inhaler, an intranasal or ocular administration device (e.g., a mister, eye or nose dropper), and a needleless injection device.

[0056] The compositions (e.g dAbs and liver targeting compositions) of this invention can be lyophilized for storage and reconstituted in a suitable carrier prior to use. Any suitable lyophilization method (e.g., spray drying, cake drying) and/or reconstitution techniques can be employed. It will be appreciated by those skilled in the art that lyophilisation and reconstitution can lead to varying degrees of antibody activity loss and that use levels may have to be adjusted to compensate. In a particular embodiment, the invention provides a composition comprising a lyophilized (freeze dried) composition as described herein. Preferably, the lyophilized (freeze dried) composition loses no more than about 20%, or no more than about 25%, or no more than about 30%, or no more than about 35%, or no more than about 40%, or no more than about 45%, or no more than about 50% of its activity (e.g., binding activity for serum albumin) when rehydrated. Activity is the amount of composition required to produce the effect of the composition before it was lyophilized. The activity of the composition can be determined using any suitable method before lyophilization, and the activity can be determined using the same method after rehydration to determine amount of lost activity.

[0057] The invention also provides sustained or slow release formulations comprising the compositions of the invention, such sustained release formulations can comprise the composition of the invention in combination with, e.g. hyaluronic acid, microspheres or liposomes and other pharmaceutically or pharmacalogically acceptable carriers, excipients and/or diluents.

[0058] In one aspect, the invention provides a pharmaceutical composition comprising a composition of the invention, and a pharmaceutically or physiologically acceptable carrier, excipient or diluent.

### BRIEF DESCRIPTION OF THE DRAWINGS:

[0059] FIG. 1: shows binding of P-GalNAc-PAA-biotin to human (His)₆-ASGPR H1 ( [symbol] ), mouse (His)₆-ASGPR H1 ( [symbol] ) and human (His)₆-GP6 irrelevant control antigen ( [symbol] ) Antigens were immobilised on a biacore CM5 chip surface and 100 nM ligand passed over at a flow rate of 10 μl min⁻¹. Sensorgram illustrates that ligand binds to human and mouse (His)₆-ASGPR H1 antigens but not (His)₆-GP6 irrlevant control antigen.

[0060] FIG. 2: shows 4-12% Bis-Tris gel loaded with 2 μg of Ni-NTA purified human (His)₆-ASGPR H1 (lane 2) or mouse (His)₆-ASGPR H1 (lane 3) expressed in HEK293E. 10 μl Mark 12 molecular weight standards (Invitrogen) were loaded in lane 1 and molecular masses (in kilodaltons) of individual marker bands are given to the left of lane 1. Gel was stained with 1× SureBlue. Gel illustrates that human and mouse (His)₆-ASGPR H1 migrate close to the expected molecular mass based on amino acid sequence.

[0061] FIG. 3: Vκ and V_{H} dAbs selected against recombinant human and mouse ASGPR proteins binding specifically to the target antigen. Antigens were coated on the surface of a CM5 BlAcore chip and protein L purified Vκ dAb DOM26m-20 (top panel) or protein A purified V_{H} dAb DOM26h-61 (bottom panel) was passed over the chip surface at a concentration of 2.5 μM using a flow-rate of 10 μl per second. In the top panel binding of dAb to (His)₆-mouse ASGPR H1 ( [symbol] )or human c-kit (His)₆ negative control antigen ( [symbol] ) is shown. In the bottom panel dAb binding to (His)₆-human ASGPR H1 ( [symbol] )or human c-kit (His)₆ negative control antigen ( [symbol] ) is shown.

[0062] FIG. 4: shows dAb clones selected against recombinant (His)₆-mouse ASGPR H1 antigen binding specifically to murine liver cell lines in a flow cytometry cell binding assay. Binding of dAbs with c-terminal FLAG epitope tags cross-linked with anti-FLAG M2 monoclonal antibody to murine hepatoma cell line Hepalc1c7 (top panel) or murine fibroblast negative control cell line L929 (bottom panel) was tested in this assay. Goat polyclonal antibody specific for mouse IgG (GaM-FITC) was used as secondary detection reagent. VκD (human germ-line Vκ sequence with a c-terminal FLAG epitope tag) was used as a non-specific dAb binding control. Results obtained with anti-FLAG M2 in the absence of dAb (FLAG only) and secondary detection reagent in the absence of dAb or anti-FLAG M2 (GaM-FITC) are also shown together with unstained cells. For each dAb a half-log dilution series was tested starting at 10 μM final concentration in the assay (right hand bar in each series).

[0063] FIG. 5: shows binding and localisation of anti-mouse ASGPR dAb DOM26m-33 following incubation with Hepal cic7 murine liver cell line. After incubation for 30 minutes in the presence of 5 μM DOM26m-33 with a c-terminal FLAG epitope tag cells were fixed with 4% paraformaldehyde/0.2% saponin and stained with monoclonal anti-FLAG M2 Cy3 conjugate to determine dAb localisation or rabbit polyclonal antibody specific for either EEA1 or LAMP1 to determine localisation of early endosome and lysosome respectively. The top panel shows similarity between the pattern of localisation for DOM26m-33 and EEA1, with some overlap in the observed staining pattern. The bottom panel shows that the pattern of localisation for DOM26m-33 and LAMP 1 are distinct, with no overlap in the observed staining pattern.

[0064] FIG. 6: shows BlAcore sensorgram from epitope mapping experiment to determine whether mouse ASGPR specific dAbs DOM26m-33 and DOM26m-52 bind to distinct epitopes within the antigen. dAbs were passed over BlAcore CM5 chip surface coated with (His)₆ mouse ASGPR H1 at a concentration of 1 μM dAb using a flow rate of 10 μl per second. Injection events are as follows:

[0065] 1=injection of dAb 1

[0066] 2=injection of dAb 2

[0067] 3=co injection of dAb 1 followed by dAb 2

[0068] 4=co injection of dAb 2 followed by dAb 1

[0069] *=regeneration of chip surface with 15 second pulse of 0.1 M glycine, pH 2.0

[0070] In this experiment co injection of DOM26m-33 and DOM26m-52 inhibits binding (in comparison to dAb injected alone) by >20%, therefore DOM26m-33 and DOM26m-52 bind to partially overlapping epitopes within mouse ASGPR H1 subunit. Antibody binding of mouse ASGPR H1 was unaffected by regeneration with 0.1 M glycine, pH 2.0 in these experiments.

[0071] FIG. 7: shows localisation of ¹¹¹In labelled dAbs in balb/c mice at 3 hours post injection. Following intravenous dosing of 12 MBq of radiolabelled dAb via tail vein injection mice were imaged using a nanospect camera. Images show that at 3 hours signal is observed in kidney and bladder with all three dAb molecules, whereas liver localisation in only observed with anti murine ASGPR dAb DOM26m-33.

[0072] FIG. 8: shows biodistribution of ¹¹¹In labelled dAbs 3 hours after dosing intravenously in balb/c mice via the tail vein. Approximately 0.5 MBq radiolabelled dAb was injected in each case. Results show accumulation of radiolabelled dAb in mouse liver is 12.4 times higher in mice injected with DOM26m-33 than in mice injected with Vκ dummy and 4.9 times higher than in mice injected with V_{H} dummy

[0073] FIG. 9: shows 4-12% Bis-Tris gel loaded with 2 μg per lane of protein L purified mIFNa2-dAb fusions reduced with 10 mM DTT. Lane designations as follows:

[0074] mIFNa2-Vκ dummy (lane 2),

[0075] mIFNa2-Vκ dummy with C-terminal cysteine point mutation (lane 3)

[0076] mIFNa2-V_{H} dummy (lane 4)

[0077] mIFNa2-V_{H} dummy with C-terminal cysteine point mutation (lane 5)

[0078] mIFNa2-DOM26m-33 (lane 6)

[0079] mIFNa2-DOM26m-33 with C-terminal cysteine point mutation (lane 7)

[0080] 10 μl Mark 12 molecular weight standards (Invitrogen) were loaded in lane 1 and molecular masses (in kilodaltons) of individual marker bands are given to the left of lane 1. Gel was stained with 1× SureBlue. Gel illustrates that mouse IFNa2-dAb fusions migrate close to the expected molecular mass of approximately 33 KDa.

[0081] FIG. 10: shows activity of mouse IFN-dAb fusions in CHO ISRE-Luc transient transfection assay. CHO-Kl cells were incubated with the indicated concentrations of mouse IFN-alpha standard or mouse IFN-dAb fusion protein. Top panel shows results obtained with mouse IFNa2-DOM26m-33 fusion proteins, middle panel shows results obtained with mouse IFNa2-V_{H} dummy 2 fusion proteins and lower panel shows results obtained with mouse IFNa2-Vκ dummy fusion proteins. Symbols denote the following:

[0082] ▴=mouse IFNa2-dAb fusions

[0083] ▪=mouse IFNa2-dAb fusions with C-terminal cysteine mutation

[0084] ▾=mouse IFN-alpha standard.

[0085] FIG. 11 a shows binding of mouse mouse IFNa2-DOM26m-33 fusions to (His)6 mouse ASGPR H1 coated on the surface of BlAcore CM5 chip. Traces represent binding of DOM26m-33 only ( [symbol] )shown in all panels for comparison, mouse IFNa2-dAb fusions ( [symbol] ) and mouse IFNa2-dAb fusions with C-terminal cysteine mutation ( [symbol] ).

[0086] FIG. 11b shows binding of mouse mouse IFNa2-DOM26m-33 fusions to (His)6 mouse ASGPR H1 coated on the surface of BlAcore CM5 chip.

[0087] Traces represent binding of DOM26m-33 only ( [symbol] )shown in all panels for comparison, mouse IFNa2-dAb fusions ( [symbol] ) and mouse IFNa2-dAb fusions with C-terminal cysteine mutation ( [symbol] )

[0088] FIG. 11c shows binding of mouse mouse IFNa2-DOM26m-33 fusions to (His)6 mouse ASGPR H1 coated on the surface of BlAcore CM5 chip. Traces represent binding of DOM26m-33 only ( [symbol] )shown in all panels for comparison, mouse IFNa2-dAb fusions ( [symbol] ) and mouse IFNa2-dAb fusions with C-terminal cysteine mutation ( [symbol] ).

[0089] FIG. 12: shows murine ASGPR specific dAb clones grouped according to epitopes bound within the antigen.

[0090] FIG. 13: shows nucleotide sequences of anti-human Vh ASGPR dAbs. (Seq ID No.s 155-549; odd numbers only)

[0091] FIG. 14: shows nucleotide sequences of anti-human V kappa ASGPR dAbs. (Seq ID No.s 551-603; odd numbers only)

[0092] FIG. 15: shows amino acid sequences of anti-human Vh ASGPR dAbs. (Seq ID No.s 156-550; even numbers only)

[0093] FIG. 16: shows amino acid sequences of anti-human V kappa ASGPR dAbs. (Seq ID No.s 552-604; even numbers only)

[0094] FIG. 17: shows nucleotide sequences of anti-mouse Vh ASGPR dAbs. (Seq ID No.s 605-743; odd numbers only)

[0095] FIG. 18: shows nucleotide sequences of anti-mouse V kappa ASGPR dAbs. (Seq ID No.s 745-865; odd numbers only)

[0096] FIG. 19: shows amino acid sequences of anti-mouse Vh ASGPR dAbs. (Seq ID No.s 606-744; even numbers only)

[0097] FIG. 20: shows amino acid sequences of anti-mouse V kappa ASGPR dAbs. (Seq ID No.s 746-866; even numbers only)

[0098] FIG. 21 shows binding of ASGPR specific dAbs DOM26h-196 ( [symbol] ) and DOM26h-196-61

[0099] ( [symbol] )to human (His)₆-ASGPR H1. Biotinylated (His)₆-ASGPR H1 was immobilised on a Biacore streptavidin chip surface and 62 nM dAb passed over at a flow rate of 40 μl.min⁻¹. Sensorgram illustrates that DOM26h-196-61 binds to human (His)₆-ASGPR H1 antigen with higher affinity than that of the DOM26h-196 parental clone.

[0100] FIG. 22 shows 4-12% Bis-Tris gel loaded with 2 μg of Ni-NTA purified human (His)₆-ASGPR H1 stalk domain (lane 2), human (His)₆-ASGPR H1 stalk domain treated with PNGase F (lane 3), human (His)₆-ASGPR H1 lectin domain (lane4), human (His)₆-ASGPR H1 lectin domain treated with PNGase F (lane 5). 10 μl Novex Sharp prestained molecular weight standards (Invitrogen) were loaded in lane 1 and molecular masses (in kilodaltons) of individual marker bands are given to the left of lane 1. Gel was stained with lx SureBlue. Gel shows that stalk domain is extensively glycosylated as the protein only runs at the expected molecular mass following treatment with PNGase F, whereas lectin domain runs at the expected molecular mass in the presence or absence of PNGase F digestion.

[0101] FIG. 23 shows binding of ASGPR specific dAb DOM26h-196-61 to biotinylated (His)₆-human ASGPR H1 lectin domain residues cysteine 154-leucine 291 [symbol] ), (His)₆-mouse ASGPR H1 full extracellular domain residues serine 60-asparagine 284 ( [symbol] ) and (His)₆-human ASGPR H1 stalk domain residues glutamine 62-cysteine 153 ( [symbol] ) Biotinylated antigens were immobilised on a Biacore streptavidin chip surface and dAb passed over at a concentration of 60 nM and flow rate of 40 μl.min⁻¹. Sensorgram illustrates that DOM26h-196-61 binds to human ASGPR H1 lectin domain and mouse ASGPR H1 extracellular domain but not human ASGPR H1 stalk domain.

[0102] FIG. 24 shows localisation of ¹¹¹In labelled dAbs in balb/c mice at 3 hours post injection. Following intravenous dosing of 12 MBq of radiolabelled dAb via tail vein injection mice were imaged using a nanospect camera. Images show that at 3 hours signal is observed in kidney and bladder with all dAb molecules, whereas liver localisation is only observed with anti ASGPR V_{H} dAb DOM26h-196-61 and anti ASGPR V₇₈ , dAb DOM26h-161-84.

[0103] FIG. 25 a & b shows biodistribution of ¹¹¹In labelled dAbs 3 hours after dosing intravenously in balb/c mice via the tail vein. Approximately 0.5 MBq radiolabelled dAb was injected in each case. Results show accumulation of radiolabelled ASGPR dAb in mouse liver is considerably higher than that observed with either V₇₈/V_{H} dummy 2 dAbs.

[0104] As used herein, “interferon activity” refers to a molecule which, as determined suing the B16-Blue assay (Invirogen) performed as described herein (Example 12), has at least 10, 15, 20, 25, 30, 35, 40, 45 or even 50% of the amount of interferon activity of an equivalent amount of recombinant mouse interferon alpha (e.g. from PBL Biomedical Laboratories).

[0105] FIG. 26 shows 4-12% Bis-Tris gel loaded with 2 μg per lane of protein L purified mIFNa2-dAb fusions reduced with 10 mM DTT. Lane designations as follows:

[0106] mIFNa2-Vκ dummy (lane 2)

[0107] mIFNa2-V_{H} dummy 2 (lane 3)

[0108] mIFNa2-DOM26h-161-84 (lane 4)

[0109] mIFNa2-DOM26h-196-61 (lane 5)

[0110] 10 μl Novex Sharp prestained molecular weight standards (Invitrogen) were loaded in lane 1 and molecular masses (in kilodaltons) of individual marker bands are given to the left of lane 1. Gel was stained with 1× SureBlue. Gel illustrates that mouse IFNa2-dAb fusions migrate close to the expected molecular mass of approximately 33 KDa.

[0111] FIG. 27 shows activity of mouse IFN-dAb fusions (+/−DOTA conjugation) in B16 mouse IFNα/β reporter cell line. B16 cells were incubated with the indicated concentrations of mouse IFN-alpha standard or mouse IFN-dAb fusion protein and interferon activity assayed by measuring the level of reporter gene expression which is directly proportional to absorbance measured at 640 nm. Top panel shows results obtained with mouse IFNa2-V_{H} dummy 2 fusion protein, bottom panel shows results obtained with mouse IFNa2-DOM26h-196-61 fusion protein. Symbols denote the following:

[0112] ▴=mouse IFNa2-dAb fusion

[0113] ▪=mouse IFNa2-dAb fusion conjugated to NHS:DOTA

[0114] ▾=mouse IFN-alpha standard

[0115] FIG. 28 shows binding of mouse IFNa2-dAb fusions to biotinylated (His)₆-human ASGPR H1 lectin domain and (His)₆-mouse ASGPR H1 coated on the surface of a BlAcore streptavidin chip. Fusion proteins were passed over the chip surface at a concentration of 1 μM and a flow rate of 40 μl.min⁻¹.

[0116] Top panel shows binding of mouse IFNa2-DOM36h-196-61 fusion protein ( [symbol] ) and mouse IFNa2-V_{H} dummy 2 fusion protein ( [symbol] ) to (His)₆-human ASGPR H1 lectin domain. Bottom panel shows binding of mouse IFNa2-DOM36h-196-61 fusion protein ( [symbol] )and mouse IFNa2-V_{H} dummy 2 fusion protein ( [symbol] ) to (His)₆-mouse ASGPR H1.

[0117] FIG. 29 shows localisation of ¹¹¹In labelled mouse IFNa2-dAb fusions in balb/c mice at 3 hours post injection. Following intravenous dosing of 12 MBq of radiolabelled dAb via tail vein injection mice were imaged using a nanospect camera. Images show that at 3 hours signal is observed in liver, kidney and bladder with mouse IFNa2-V_{H} dummy 2 and mouse IFNa2-DOM26h-196-61 fusion proteins, however the liver appears brighter in the image in the right hand panel, indicating a greater level of liver uptake of mouse IFNa2-DOM26h-196-61 compared to mouse IFNa2-V_{H} dummy 2.

[0118] FIG. 30 shows biodistribution of ¹¹¹In labelled mouse IFNa2-dAb fusion protein 3 hours after dosing intravenously in balb/c mice via the tail vein. Approximately 0.5 MBq radiolabelled dAb was injected in each case. Results show both mouse IFNa2-DOM26h-196-61 (black bars) and mouse IFNa2-V_{H} dummy 2 (grey bars) accumulate in the liver and kidney, however the liver/kidney ratio of mouse IFNa2-DOM26h-196-61 is approximately 2.2 fold higher than that of mouse IFNa2-V_{H} dummy 2, indicative of successful liver targeting of mouse IFNa2 by genetic fusion to ASGPR dAb DOM26h-196-61.

[0119] FIGS. 31 and 32 show the amino acid (Seq ID No.s 868-880; even numbers only) and nucleotide (Seq ID No.s 867-879; odd numbers only) sequences respectively of the various affinity-matured DOM26h clones.

### DETAILED DESCRIPTION OF THE INVENTION

[0120] Within this specification the invention has been described, with reference to embodiments, in a way which enables a clear and concise specification to be written. It is intended and should be appreciated that embodiments may be variously combined or separated without departing from the invention. For the avoidance of doubt, it is expressly stated that features of the invention disclosed herein in relation to one embodiment of the invention may be combined with any one or more other features of the invention disclosed in relation to other embodiments of the invention, unless the context dictates otherwise.

[0121] Unless defined otherwise, all technical and scientific terms used herein have the same meaning as commonly understood by one of ordinary skill in the art (e.g., in cell culture, molecular genetics, nucleic acid chemistry, hybridization techniques and biochemistry). Standard techniques are used for molecular, genetic and biochemical methods (see generally, Sambrook et al., Molecular Cloning: A Laboratory Manual, 2d ed. (1989) Cold Spring Harbor Laboratory Press, Cold Spring Harbor, N.Y. and Ausubel et al., Short Protocols in Molecular Biology (1999) 4^{th} Ed, John Wiley & Sons, Inc. which are incorporated herein by reference) and chemical methods.

[0122] The term “analogue” as used herein referring to a polypeptide means a modified peptide wherein one or more amino acid residues of the peptide have been substituted by other amino acid residues and/or wherein one or more amino acid residues have been deleted from the peptide and/or wherein one or more amino acid residues have been added to the peptide. Such addition or deletion of amino acid residues can take place at the N-terminal of the peptide and/or at the C-terminal of the peptide or they can be within the peptide.

[0123] The term ASGPR receptor as used herein refers to the Asialoglycoprotein receptor present on the surface of hepatocytes (see Meier et al., J. Mol. Biol., 2000, 300, pp 857-865), and more specifically to the H1 subunit thereof.

[0124] As used herein “fragment,” when used in reference to a polypeptide, is a polypeptide having an amino acid sequence that is the same as part but not all of the amino acid sequence of the entire naturally occurring polypeptide. Fragments may be “free-standing” or comprised within a larger polypeptide of which they form a part or region as a single continuous region in a single larger polypeptide.

[0125] As used herein, “peptide” refers to about two to about 50 amino acids that are joined together via peptide bonds.

[0126] As used herein, “polypeptide” refers to at least about 50 amino acids that are joined together by peptide bonds. Polypeptides generally comprise tertiary structure and fold into functional domains.

[0127] As used herein, “display system” refers to a system in which a collection of polypeptides or peptides are accessible for selection based upon a desired characteristic, such as a physical, chemical or functional characteristic. The display system can be a suitable repertoire of polypeptides or peptides (e.g., in a solution, immobilized on a suitable support). The display system can also be a system that employs a cellular expression system (e.g., expression of a library of nucleic acids in, e.g., transformed, infected, transfected or transduced cells and display of the encoded polypeptides on the surface of the cells) or an acellular expression system (e.g., emulsion compartmentalization and display). Exemplary display systems link the coding function of a nucleic acid and physical, chemical and/or functional characteristics of a polypeptide or peptide encoded by the nucleic acid. When such a display system is employed, polypeptides or peptides that have a desired physical, chemical and/or functional characteristic can be selected and a nucleic acid encoding the selected polypeptide or peptide can be readily isolated or recovered. A number of display systems that link the coding function of a nucleic acid and physical, chemical and/or functional characteristics of a polypeptide or peptide are known in the art, for example, bacteriophage display (phage display, for example phagemid display), ribosome display, emulsion compartmentalization and display, yeast display, puromycin display, bacterial display, display on plasmid, covalent display and the like. (See, e.g., EP 0436597 (Dyax), U.S. Pat. No. 6,172,197 (McCafferty et al.), U.S. Pat. No. 6,489,103 (Griffiths et al.).)

[0128] As used herein, “functional” describes a polypeptide or peptide that has biological activity, such as specific binding activity. For example, the term “functional polypeptide” includes an antibody or antigen-binding fragment thereof that binds a target antigen through its antigen-binding site.

[0129] As used herein, “target ligand” refers to a ligand which is specifically or selectively bound by a polypeptide or peptide. For example, when a polypeptide is an antibody or antigen-binding fragment thereof, the target ligand can be any desired antigen or epitope. Binding to the target antigen is dependent upon the polypeptide or peptide being functional.

[0130] As used herein an antibody refers to IgG, IgM, IgA, IgD or IgE or a fragment (such as a Fab , F(ab′)₂, Fv, disulphide linked Fv, scFv, closed conformation multispecific antibody, disulphide-linked scFv, diabody) whether derived from any species naturally producing an antibody, or created by recombinant DNA technology; whether isolated from serum, B-cells, hybridomas, transfectomas, yeast or bacteria.

[0131] As used herein, “antibody format” refers to any suitable polypeptide structure in which one or more antibody variable domains can be incorporated so as to confer binding specificity for antigen on the structure. A variety of suitable antibody formats are known in the art, such as, chimeric antibodies, humanized antibodies, human antibodies, single chain antibodies, bispecific antibodies, antibody heavy chains, antibody light chains, homodimers and heterodimers of antibody heavy chains and/or light chains, antigen-binding fragments of any of the foregoing (e.g., a Fv fragment (e.g., single chain Fv (scFv), a disulfide bonded Fv), a Fab fragment, a Fab′ fragment, a F(ab′)₂ fragment), a single antibody variable domain (e.g., a dAb, V_{H}, V_{HH}, V_{L}), and modified versions of any of the foregoing (e.g., modified by the covalent attachment of polyethylene glycol or other suitable polymer or a humanized V_{HH}).

[0132] The phrase “immunoglobulin single variable domain” refers to an antibody variable domain (V_{H}, V_{HH}, V_{L}) that specifically binds an antigen or epitope independently of other V regions or domains. An immunoglobulin single variable domain can be present in a format (e.g., homo- or hetero-multimer) with other variable regions or variable domains where the other regions or domains are not required for antigen binding by the single immunoglobulin variable domain (i.e., where the immunoglobulin single variable domain binds antigen independently of the additional variable domains). A “domain antibody” or “dAb” is the same as an “immunoglobulin single variable domain” as the term is used herein. A “single immunoglobulin variable domain” is the same as an “immunoglobulin single variable domain” as the term is used herein. A “single antibody variable domain” is the same as an “immunoglobulin single variable domain” as the term is used herein. An immunoglobulin single variable domain is in one embodiment a human antibody variable domain, but also includes single antibody variable domains from other species such as rodent (for example, as disclosed in WO 00/29004, the contents of which are incorporated herein by reference in their entirety), nurse shark and Camelid V_{HH} dAbs. Camelid V_{HH} are immunoglobulin single variable domain polypeptides that are derived from species including camel, llama, alpaca, dromedary, and guanaco, which produce heavy chain antibodies naturally devoid of light chains. The V_{HH} may be humanized.

[0133] A “domain” is a folded protein structure which has tertiary structure independent of the rest of the protein. Generally, domains are responsible for discrete functional properties of proteins, and in many cases may be added, removed or transferred to other proteins without loss of function of the remainder of the protein and/or of the domain. A “single antibody variable domain” is a folded polypeptide domain comprising sequences characteristic of antibody variable domains. It therefore includes complete antibody variable domains and modified variable domains, for example, in which one or more loops have been replaced by sequences which are not characteristic of antibody variable domains, or antibody variable domains which have been truncated or comprise N- or C-terminal extensions, as well as folded fragments of variable domains which retain at least the binding activity and specificity of the full-length domain.

[0134] The term “library” refers to a mixture of heterogeneous polypeptides or nucleic acids. The library is composed of members, each of which has a single polypeptide or nucleic acid sequence. To this extent, “library” is synonymous with “repertoire.” Sequence differences between library members are responsible for the diversity present in the library. The library may take the form of a simple mixture of polypeptides or nucleic acids, or may be in the form of organisms or cells, for example bacteria, viruses, animal or plant cells and the like, transformed with a library of nucleic acids. In one embodiment, each individual organism or cell contains only one or a limited number of library members. In one embodiment, the nucleic acids are incorporated into expression vectors, in order to allow expression of the polypeptides encoded by the nucleic acids. In an aspect, therefore, a library may take the form of a population of host organisms, each organism containing one or more copies of an expression vector containing a single member of the library in nucleic acid form which can be expressed to produce its corresponding polypeptide member. Thus, the population of host organisms has the potential to encode a large repertoire of diverse polypeptides.

[0135] As used herein, the term “dose” refers to the quantity of fusion or conjugate administered to a subject all at one time (unit dose), or in two or more administrations over a defined time interval. For example, dose can refer to the quantity of fusion or conjugate administered to a subject over the course of one day (24 hours) (daily dose), two days, one week, two weeks, three weeks or one or more months (e.g., by a single administration, or by two or more administrations). The interval between doses can be any desired amount of time.

[0136] As used herein, “interferon activity” refers to a molecule which, as determined using the B16-Blue assay (Invivogen) performed as described herein (Example 12), has at least 10, 15, 20, 25, 30, 35, 40, 45 or even 50% of the amount of activity of an equal amount of recombinant mouse interferon alpha (e.g. from PBL Biomedical Laboratories).

[0137] The phrase, “half-life,” refers to the time taken for the serum or plasma concentration of the fusion or conjugate to reduce by 50%, in vivo, for example due to degradation and/or clearance or sequestration by natural mechanisms. The compositions of the invention are stabilized in vivo and their half-life increased by binding to serum albumin molecules e.g. human serum albumin (HSA) which resist degradation and/or clearance or sequestration. These serum albumin molecules are naturally occurring proteins which themselves have a long half-life in vivo. The half-life of a molecule is increased if its functional activity persists, in vivo, for a longer period than a similar molecule which is not specific for the half-life increasing molecule.

[0138] As used herein, “hydrodynamic size” refers to the apparent size of a molecule (e.g., a protein molecule, ligand) based on the diffusion of the molecule through an aqueous solution. The diffusion, or motion of a protein through solution can be processed to derive an apparent size of the protein, where the size is given by the “Stokes radius” or “hydrodynamic radius” of the protein particle. The “hydrodynamic size” of a protein depends on both mass and shape (conformation), such that two proteins having the same molecular mass may have differing hydrodynamic sizes based on the overall conformation of the protein.

[0139] Calculations of “homology” or “identity” or “similarity” between two sequences (the terms are used interchangeably herein) are performed as follows. The sequences are aligned for optimal comparison purposes (e.g., gaps can be introduced in one or both of a first and a second amino acid or nucleic acid sequence for optimal alignment and non-homologous sequences can be disregarded for comparison purposes). In an embodiment, the length of a reference sequence aligned for comparison purposes is at least 30%, or at least 40%, or at least 50%, or at least 60%, or at least 70%, 80%, 90%, 100% of the length of the reference sequence. The amino acid residues or nucleotides at corresponding amino acid positions or nucleotide positions are then compared. When a position in the first sequence is occupied by the same amino acid residue or nucleotide as the corresponding position in the second sequence, then the molecules are identical at that position (as used herein amino acid or nucleic acid “homology” is equivalent to amino acid or nucleic acid “identity”). The percent identity between the two sequences is a function of the number of identical positions shared by the sequences, taking into account the number of gaps, and the length of each gap, which need to be introduced for optimal alignment of the two sequences. Amino acid and nucleotide sequence alignments and homology, similarity or identity, as defined herein may be prepared and determined using the algorithm BLAST 2 Sequences, using default parameters (Tatusova, T. A. et al., FEMS Microbiol Lett, 174:187 -188 (1999).

### Nucleic Acids, Host Cells:

[0140] The invention relates to isolated and/or recombinant nucleic acids encoding the compositions of the invention that are described herein.

[0141] Nucleic acids referred to herein as “isolated” are nucleic acids which have been separated away from other material (e.g., other nucleic acids such as genomic DNA, cDNA and/or RNA) in its original environment (e.g., in cells or in a mixture of nucleic acids such as a library). An isolated nucleic acid can be isolated as part of a vector (e.g., a plasmid).

[0142] Nucleic acids referred to herein as “recombinant” are nucleic acids which have been produced by recombinant DNA methodology, including methods which rely upon artificial recombination, such as cloning into a vector or chromosome using, for example, restriction enzymes, homologous recombination, viruses and the like, and nucleic acids prepared using the polymerase chain reaction (PCR).

[0143] The invention also relates to a recombinant host cell e.g. mammalian or microbial, which comprises a (one or more) recombinant nucleic acid or expression construct comprising nucleic acid(s) encoding a composition e.g. fusion, of the invention as described herein. There is also provided a method of preparing a composition, e.g. fusion, of the invention as described herein, comprising maintaining a recombinant host cell e.g.mammalian or microbial, of the invention under conditions appropriate for expression of the fusion polypeptide. The method can further comprise the step of isolating or recovering the fusion, if desired.

[0144] For example, a nucleic acid molecule (i.e., one or more nucleic acid molecules) encoding a composition of the invention e.g. a liver targeting composition of the invention, or an expression construct (i.e., one or more constructs) comprising such nucleic acid molecule(s), can be introduced into a suitable host cell to create a recombinant host cell using any method appropriate to the host cell selected (e.g., transformation, transfection, electroporation, infection), such that the nucleic acid molecule(s) are operably linked to one or more expression control elements (e.g., in a vector, in a construct created by processes in the cell, integrated into the host cell genome). The resulting recombinant host cell can be maintained under conditions suitable for expression (e.g., in the presence of an inducer, in a suitable non-human animal, in suitable culture media supplemented with appropriate salts, growth factors, antibiotics, nutritional supplements, etc.), whereby the encoded peptide or polypeptide is produced. If desired, the encoded peptide or polypeptide can be isolated or recovered (e.g., from the animal, the host cell, medium, milk). This process encompasses expression in a host cell of a transgenic animal (see, e.g., WO 92/03918, GenPharm International), especially a transgenic non-human animal.

[0145] The compositions, e.g. fusion polypeptides, of the invention described herein can also be produced in a suitable in vitro expression system, e.g. by chemical synthesis or by any other suitable method.

[0146] As described and exemplified herein, compositions e.g. fusions and conjugates of the invention, generally bind ASGPR with high affinity.

[0147] For example, the fusions or conjugates can bind human ASGPR with an affinity (KD; KD=K_{off}(kd)/Kₒₙ(ka) [as determined by surface plasmon resonance] of about 5 micromolar to about 1 pM , e.g. about 10 nM to about 1 pM e.g. about 1 nM to about 1 pM.

[0148] The compositions e.g. dAbs and/or liver targeting compositions, of the invention can be expressed in E. coli or in Pichia species (e.g., P. pastoris). In one embodiment, the a liver targeting fusion is secreted in E. coli or in Pichia species (e.g., P. pastoris); or in mammalian cell culture (e.g. CHO, or HEK 293 cells). Although, the fusions or conjugates described herein can be secretable when expressed in E. coli or in Pichia species or mammalian cells they can be produced using any suitable method, such as synthetic chemical methods or biological production methods that do not employ E. coli or Pichia species.

[0149] Generally, the compositions of the invention will be utilised in purified form together with pharmacologically or physiologically appropriate carriers. Typically, these carriers can include aqueous or alcoholic/aqueous solutions, emulsions or suspensions, any including saline and/or buffered media. Parenteral vehicles can include sodium chloride solution, Ringer's dextrose, dextrose and sodium chloride and lactated Ringer's. Suitable physiologically-acceptable adjuvants, if necessary to keep a polypeptide complex in suspension, may be chosen from thickeners such as carboxymethylcellulose, polyvinylpyrrolidone, gelatin and alginates.

[0150] Intravenous vehicles include fluid and nutrient replenishers and electrolyte replenishers, such as those based on Ringer's dextrose. Preservatives and other additives, such as antimicrobials, antioxidants, chelating agents and inert gases, may also be present (Mack (1982) Remington's Pharmaceutical Sciences, 16th Edition). A variety of suitable formulations can be used, including extended release formulations.

[0151] The route of administration of pharmaceutical compositions according to the invention may be any of those commonly known to those of ordinary skill in the art. For therapy, compositions of the invention can be administered to any patient in accordance with standard techniques.

[0152] The administration can be by any appropriate mode, including by subcutaneous injection, parenterally, intravenously, intramuscularly, intraperitoneally, orally, transdermally, via the pulmonary route, or also, appropriately, by direct infusion with a catheter. The dosage and frequency of administration will depend on the age, sex and condition of the patient, concurrent administration of other drugs, counterindications and other parameters to be taken into account by the clinician. Administration can be local or systemic as indicated.

[0153] The compositions of this invention can be lyophilised for storage and reconstituted in a suitable carrier prior to use. This technique has been shown to be effective with conventional immunoglobulins and art-known lyophilisation and reconstitution techniques can be employed. It will be appreciated by those skilled in the art that lyophilisation and reconstitution can lead to varying degrees of antibody activity loss (e.g. with conventional immunoglobulins, IgM antibodies tend to have greater activity loss than IgG antibodies) and that use levels may have to be adjusted upward to compensate.

[0154] Treatment or therapy performed using the compositions described herein is considered “effective” if one or more symptoms or signs are reduced or alleviated (e.g., by at least 10% or at least one point on a clinical assessment scale), relative to such symptoms present before treatment, or relative to such symptoms in an individual (human or model animal) not treated with such composition or other suitable control. Symptoms will obviously vary depending upon the precise nature of the disease or disorder targeted, but can be measured by an ordinarily skilled clinician or technician.

[0155] Similarly, prophylaxis performed using a composition as described herein is “effective” if the onset or severity of one or more symptoms or signs is delayed, reduced or abolished relative to such symptoms in a similar individual (human or animal model) not treated with the composition.

[0156] The compositions of the present invention may be administered in conjunction with other therapeutic or active agents e.g. other polypeptides or peptides or small molecules. These further agents can include various drugs, such as for example ribavirin.

[0157] The compositions of the invention can be administered and/or formulated together with one or more additional therapeutic or active agents. When a composition of the invention is administered with an additional therapeutic agent, e.g. the liver targeting composition (e.g. a fusion or conjugate) can be administered before, simultaneously, with, or subsequent to administration of the additional agent e.g. ribavirin. Generally, the composition of the invention and the additional agent are administered in a manner that provides an overlap of therapeutic effect.

[0158] Compositions of the invention comprising dAbs, provide several further advantages. The Domain antibody component is very stable, is small relative to antibodies and other antigen-binding fragments of antibodies, can be produced in high yields by expression in E. coli or yeast (e.g., Pichia pastoris). Accordingly, compositions of the invention that comprise the dAb that binds hepatocytes (e.g. the ASGPR receptor on hepatocytes) can be produced more easily than therapeutics that are generally produced in mammalian cells (e.g., human, humanized or chimeric antibodies) and dAbs that are not immunogenic can be used (e.g., a human dAb can be used for treating or diagnosing disease in humans).

[0159] Additionally, the compositions described herein can have an enhanced safety profile and fewer side effects than the therapeutic molecule(s) e.g. interferon alone alone as a result of the specific targeting to the liver. Similarly, administration of the compositions of the invention can have reduced toxicity toward particular organs and/or bodily tissues outside of the liver than administration of the therapeutic molecule(s) alone and can also have improved efficacy e.g. as a result of specifically directing the therapeutic molecule to the liver at effective doses for systemic delivery, when administration of such molecules might otherwise be toxic to other organs and tissues

### EXAMPLES:

### Example 1

[0160] Cloning and Expression of Human and Mouse Asialoglycoprotein H1 Receptor Subunits

[0161] Full length human and mouse asialoglycoprotein receptor H1 subunit (ASGPR H1) cDNA was custom synthesised by DNA2.0 (Mealo Park Calif., USA). DNA encoding the extracellular domain (Q62-L291 for human and S60-N284 for mouse) with an N-terminal (His)₆ tag was amplified by PCR using primers DLT007 and DLT008 (human) or DLT009 and DLT010 (mouse). Sequences are shown in Table 1 below.

TABLE 1

| DLT007 | GGATCCACCGGCCATCATCATCATCATCACCAGAACTCCC | Human (His)₆ ASGPR |
|---|---|---|
| | AACTCCAGGAA (Seq ID No.1) | H1 5′ primer |
| DLT008 | AAGCTTTTATTACAGGAGTGGAGGCTCTTGTGA | Human (His)₆ |
| | (Seq ID No. 2) | ASGPR H1 3′ primer |
| DLT0090 | GGATCCACCGGCCATCATCATCATCATCACAGTCAAAATT | Mouse (His)₆ |
| | CCCAATTGCGC (Seq ID No. 3) | ASGPR H1 5′ primer |
| DLT010 | AAGCTTTTATTAATTGGCTTTGTCCAGCTTTGT | Mouse (His)₆ |
| | (Seq ID No. 4) | ASGPR H1 3′ primer |

[0162] PCR fragments were inserted into holding vector pCR-Zero Blunt (Invitrogen) by Topoisomerase cloning and sequenced to obtain error-free clones using M13 forward and M13 reverse primers. (His)₆-ASGPR H1 encoding DNA was obtained by gel purification following BamHI/HindIII digestion of pCR-Zero Blunt containing the insert and inserts ligated into the corresponding sites in pDOM50, a mammalian expression vector which is a pTT5 derivative with an N-terminal V-J2-C mouse IgG secretory leader sequence to facilitate expression into the cell media.

Leader sequence (amino acid):
(Seq ID No. 5)
METDTLLLWVLLLWVPGSTG
Leader sequence (nucleotide):
(Seq ID No. 6)
ATGGAGACCGACACCCTGCTGCTGTGGGTGCTGCTGCTGTGGGTGCCCGG
ATCCACCGGGC

[0163] Plasmid DNA was prepared using QIAfilter megaprep (Qiagen). 1 μg DNA/ml was transfected with 293-Fectin into HEK293E cells and grown in serum free media. The protein is expressed in culture for 5 days and purified from culture supernatant using Ni-NTA resin and eluted with PBS+0.5 M Imidazole. The proteins were buffer exchanged into PBS.

[0164] N-termini of the receptor subunits were determined by Edman sequencing. The N-terminus of the Human (His)₆-ASGPR H1 subunit was identified as:

[0165] HHHHHHQNSQLQEEL (Seq ID No. 7) with an additional sequence identified as: LRGLREFTS (Seq ID No. 8) corresponding to a cleavage product. However the sequence corresponding to the intact receptor was present in an approximately 5 fold molar excess compared to that of the cleavage product. The N-terminus of Mouse (His)₆-ASGPR H1 subunit was identified as:

[0166] HHHHHHSQNXQLRED (Seq ID No. 9) with no additional sequences identified. To assay for potential ligand binding activity receptor subunits were immobilised on a biacore CM5 chip surface and binding to the synthetic ligand P-GalNAc-PAA-biotin (Glycotech) was analysed (FIG. 1). Purity of HEK293E receptor eluted from Ni-NTA was also analysed by non-reducing SDS-PAGE (FIG. 2). SDS-PAGE analysis shows that human and mouse (His)₆-ASGPR HI subunits migrate close to the expected molecular mass based on amino acid sequence (27.2 KDa for human and 26.5 KDa for mouse. More than one species migrating close to the expected molecular mass was observed in both human and mouse (His)₆-ASGPR HI samples, typical of glycosylated protein samples.

[0167] Sequences:

(His)₆-Human ASGPR H1
(Seq ID No. 10)
HHHHHHQNSQLQEELRGLRETFSNFTASTEAQVKGLSTQGGNVGRKMKSL
SEQLEKQQKDLSEDHSSLLLHVKQFVSDLRSLSCQMAALQGNGSERTCCP
VNWVEHERSCYWFSRSGKAWADADNYCRLEDAHLVVVTSWEEQKFVQHHI
GPVNTWMGLHDQNGPWKWVDGTDYETGFKNWRPEQPDDWYGHGLGGGEDC
AHFTDDGRWNDDVCQRPYRWVCETELDKASQEPPLL
(Seq ID No. 11)
CATCATCATCATCATCACCAGAACTCCCAACTCCAGGAAGAACTTCGAGG
ACTGAGGGAGACTTTCTCCAATTTCACCGCAAGCACGGAGGCTCAAGTGA
AGGGCCTCAGCACCCAGGGCGGGAATGTGGGCAGGAAAATGAAATCCCTG
GAGAGCCAGCTCGAAAAGCAGCAGAAAGATCTGTCCGAGGACCACTCAGT
CCTGTTGTTGCACGTGAAACAGTTTGTTTCCGACCTTAGGAGTCTTTCTT
GCCAAATGGCCGCCCTCCAGGGAAACGGGTCCGAGAGAACTTGCTGCCCC
GTCAATTGGGTGGAGCACGAGCGGTCTTGTTATTGGTTTAGCCGAAGCGG
AAAAGCCTGGGCCGATGCAGATAACTACTGCCGGCTTGAGGACGCCCATC
TGGTCGTGGTGACCAGTTGGGAGGAACAGAAATTCGTACAGCATCATATC
GGGCCTGTTAACACATGGATGGGCCTTCATGACCAGAATGGTCCTTGGAA
GTGGGTTGACGGAACCGATTACGAAACCGGATTCAAGAACTGGCGGCCTG
AACAGCCAGACGACTGGTATGGACACGGCCTCGGAGGCGGGGAGGACTGC
GCGCATTTCACAGACGATGGCCGGTGGAATGATGATGTGTGCCAAAGGCC
TTACAGATGGGTCTGCGAGACAGAGCTGGATAAGGCTTCACAAGAGCCTC
CACTCCTG
(His)₆-Mouse ASGPR H1
(Seq ID No. 12)
HHHHHHSQNSQLREDLLALRQNFSNLTVSTEDQVKALSTQGSSVGRKMKL
VESKLEKQQKDLTEDHSSLLLHVKQLVSDVRSLSCQMAAFRGNGSERTCC
WPINVEYEGSCYWFSSSVRPWTEADKYCQLENAHLVVVTSRDEQNFLQRH
LMGPNTWIGLTDQNGPWKWVDGTDYETGFQNWRPEQPDNWYGHGLGGGED
CAHFTTDGRWNDDVCRRPYRWVCETKLDKAN
(Seq ID No. 13)
CATCATCATCATCATCACAGTCAAAATTCCCAATTGCGCGAGGATCTGCT
CGCACTGCGACAGAACTTTAGCAACCTTACCGTGTCTACGGAAGACCAGG
TGAAGGCATTGTCAACTCAGGGGTCATCTGTGGGAAGAAAAATGAAGCTC
GTGGAGTCAAAGCTGGAGAAGCAGCAAAAGGACCTCACCGAAGACCATTC
CTCTCTCCTGCTGCACGTGAAGCAGCTGGTTTCTGACGTAAGGAGCCTGA
GCTGCCAGATGGCTGCTTTTCGAGGTAACGGCTCTGAGCGCACATGCTGT
CCTATTAATTGGGTGGAGTATGAGGGAAGTTGTTACTGGTTCTCAAGCTC
CGTGAGGCCATGGACCGAAGCTGACAAATATTGCCAGCTCGAAAATGCTC
ACCTCGTGGTAGTGACCTCTAGGGATGAGCAAAATTTCCTGCAGCGACAC
ATGGGGCCGCTTAATACCTGGATCGGGCTGACGGACCAGAACGGACCCTG
GAAGTGGGTTGACGGTACCGATTATGAAACTGGATTCCAAAACTGGCGGC
CAGAGCAGCCGGACAACTGGTATGGCCACGGCCTCGGAGGGGGCGAGGAC
TGTGCTCATTTTACAACGGATGGCCGGTGGAACGACGATGTGTGCAGAAG
GCCATATCGGTGGGTCTGCGAGACAAAGCTGGACAAAGCCAAT

### Example 2-Methods for Selecting dAbs

[0168] Domantis' 4G and 6G naïve phage libraries, phage libraries displaying antibody single variable domains expressed from the GAS 1 leader sequence (see WO2005/093074) for 4G and additionally with heat/cool preselection for 6G (see WO04/101790) were divided into four pools; pool 1 contained libraries 4VH11-13 and 6VH2, pool 2 contained libraries 4VH14-16 and 6VH3, pool 3 contained libraries 4VH17-19 and 6VH4 and pool 4 contained libraries 4K and 6K. Library aliquots were of sufficient size to allow 10-fold over representation of each library. Selections were carried out using passively coated and biotinylated human and mouse (His)₆-ASGPR H1 antigens. Selections using passively coated antigen were carried out as follows. After coating antigen on immunotubes (Nunc) in TBS supplemented with 5 mM Ca2⁺

[0169] (TBS/Ca²⁺) tubes were blocked with 2% Marvel in TBS/Ca²′ (MTBS/Ca²⁺ ). Library aliquots were incubated with antigen-coated immunotubes in MTBS/Ca²⁺ before washing tubes with TBS/Ca²⁺ . Bound phage was then eluted with 1 mg/ml Trypsin. The concentration of antigen during coating was decreased from 1 mg/ml to 40 μg/ml as the rounds progressed and the titres increased as the rounds progressed. Selections using biotinylated antigen were carried out as follows. Library aliquots were incubated with antigen in MTBS/Ca²⁺ for one hour before capture on streptavidin Dynabeads (Invitrogen) or Tosyl activated beads (Invitrogen) coated with neutravidin (Perbio), washed with 0.1% Tween-TBS/Ca²⁺ and TBS/Ca²⁺ then eluted with 1 mg/ml Trypsin. The concentrations of antigen were decreased from 100 nM to 1 nM as the rounds progressed and the titres increased as the rounds progressed. Following both types of selection eluted phage was used to infect log phase TG1 cells (Gibson, 1984) then infected cells were plated on tetracycline plates (15 μg/ml tetracycline). Cells infected with the phage were then grown up in 2xTY with tetracycline overnight at 37° C. before the phage were precipitated from the culture supernatant using PEG-NaCl and used for subsequent rounds of selection.

### Example 3

[0170] Screening Selection Outputs for Liver Cell Specific dAbs

[0171] After 3 rounds of selection, the dAb genes from each library pool were subcloned from the pDOM4 phage vector into the pDOM10 soluble expression vector. pDOM4 is a derivative of the fd phage vector in which the gene III signal peptide sequence is replaced with the yeast glycolipid anchored surface protein (GAS) signal peptide. It also contains a c-Myc tag between the leader sequence and gene III. In each case after selection a pool of phage DNA from appropriate round of selection is prepared using a QIAfilter midiprep kit (Qiagen), the DNA is digested using the restriction enzymes Sall and Notl and the enriched dAb genes are ligated into the corresponding sites in pDOM10.

[0172] The pDOM10 vector is a pUC119-based vector. Expression of proteins is driven by the LacZ promoter. A GAS1 leader sequence (see WO 2005/093074) ensures secretion of isolated, soluble dAbs into the periplasm and culture supernatant of E. coli. dAbs are cloned SalI/NotI in this vector, which appends a FLAG epitope tag at the C-terminus of the dAb.

[0173] The ligated DNA is used to transform E. coli TOP 10 cells which are then grown overnight on agar plates containing the antibiotic carbenicillin. The resulting colonies are individually assessed for antigen binding.

[0174] The antigen binding of individual dAb clones was assessed either by ELISA or on BlAcore. The ELISA assay took the following format. Human or mouse (His)₆-ASGPR H1 was coated at 1 g/ml onto a Maxisorp (NUNC) plate overnight at 4° C. The plate was then blocked with 2% Tween-TBS/Ca²⁺, followed by incubation with dAb supernatant diluted 1:1 with 0.1% Tween-TBS/Ca²⁺, followed by detection with 1:5000 anti-flag (M2)-HRP (SIGMA). All steps after blocking were carried out at room temperature. The binding of the dAb supernatant to a control antigen (human c-kit-(His)₆) was also analysed at the same time. In some cases dAb supernatants from selections using human antigen were also screened for binding to HepG2 and HeLa cells using the meso scale discovery (MSD) assay. Cells were plated using MULTI-ARRAY 96-well, SECTOR Imager High Bind Plates (Meso-scale) at a density of 1×10⁵ cells per well and left to incubate overnight at 37° C., 5% CO₂. The following day dAb anti-FLAG M2 complexes were prepared at 2× final concentration by dilution of dAb and biotinylated anti FLAG M2 monoclonal antibody (Sigma) in MSD assay buffer (1xPBS with 1 mM MgCl₂, 1 mM CaCl₂, 10% Foetal Bovine Serum and 1% BSA). dAb-anti FLAG complexes were incubated in a 1:1 molar ratio at room temperature for one hour. Cells were then washed 3× with 200 μl PBS before addition of 25 μl per well dAb-anti FLAG complex and incubation for one hour at room temperature for one hour with gentle agitation. Cells were then washed as above and 25 μl per well streptavidin-Sulfotag (Meso-scale) diluted to 1 μg/ml in assay buffer was then added. Cells were then incubated for one hour at room temperature, in the dark with gentle agitiation. Cells were then washed as above before resuspension in 150 μl per well of 1× MSD read buffer without surfactant (Meso-scale) and read on a SECTOR Imager 6000 (Meso-scale) at 620nm emission. Clones DOM26h-25, DOM26h-34, DOM26h-161, DOM26h-162, DOM26h-163, DOM26h-164, DOM26h-165, DOM26h-166 and DOM26h-167 and DOM26h-168 through to DOM26h-224 were screened in this assay.

[0175] Those dAbs that showed specific binding to (His)₆ ASGPR H1 by ELISA or MSD assay were screened by BlAcore. Screening by BlAcore took place using dAb supernatant expressed as above diluted 1:2 with HBS-P BlAcore running buffer. Each dAb was then injected over a blank flow cell and a flow cell coated with human or mouse (His)₆-ASGPR H1 on a CM5 chip. Any dAb clone that showed specific binding to (His)₆-ASGPR H1 was streaked out and sequenced. All unique dAb clones were expressed in 50 ml cultures (OnEX plus carbenicillin) overnight at 37° C. and purified on protein A (V_{H} dAbs) or protein L (Vκ dAbs). Purified dAbs were passed over a CM5 BIAcore chip coated with either human or mouse (His)₆-ASGPR H1 at 20μg/ml (FIG. 3). Those dAbs that bound specifically to (His)₆-ASGPR H1 were then analysed in the flow cytometry cell binding assay (FIG. 4).

[0176] Two cell lines were used as human ASGPR positive lines (HepG2 and Hep3b) and one as a negative control human line (HeLa). Two cell lines were used as mouse ASGPR positive cell lines (Hepal cic7 and NMuLi) and one as a negative control mouse line (L929). The flow cytometry cell binding assay was carried out as follows. Cells were harvested, and washed in PBS supplemented with 5% FCS and 0.5% BSA (FACS buffer). Cells were divided between the appropriate number of wells at a concentration of 1×10⁵ cells per well and incubated for one hour at 4° C. The cells were then incubated for one hour with the appropriate concentration of dAb which had previously been cross-linked by incubation with 5 μg/ml anti-FLAG M2 (Sigma) for 30 minutes at 4° C. The cells were then washed with FACS buffer and incubated for one hour at 4° C. with Goat anti-mouse FITC (Sigma) diluted 1:100 in FACS buffer. The cells were then washed with FACs buffer and resuspended in 200 μl FACS buffer before analysis by flow cytometry (FACS Canto II, using FACS Diva software). CDR sequences (determined using the method of Kabat) of clones specific for the human liver cell line HepG2 are described in the Table 2 below:

TABLE 2

| dAb | CDR1 | CDR2 | CDR3 |
|---|---|---|---|
| DOM26h-25 | RASGDIGHALW | RGGSALQS | GQSHVRPFT |
| DOM26h-34 | QASKNIGERLV | GFASLLQS | GQYRWVPAT |
| DOM26h-61 | STYPMH | SISPSGDS | NALRFDY |
| DOM26h-99 | KPYAMH | SISSTGLS | DASRFRQPFDY |
| DOM26h-104 | PKYGMA | RIGATGSE | HRGTAHSSFFDY |
| DOM26h-110 | SANGMH | VISATGDQ | GYDRRHRKFDY |
| DOM26h-159 | ADYSMY | DISPSGSM | GLPGQNMHVGFDY |
| DOM26h-161 | RASQAIGRWLL | YAASRLQS | QQAYSLPPT |
| DOM26h-162 | RASMSIDESLW | RGGSGLQS | GQAARRPYT |
| DOM26h-163 | RASHYIGNELW | RRGSGLQS | GQARHRPYT |
| DOM26h-164 | RASSNIGRSLV | AGGSLLQS | GQYAEEPFT |
| DOM26h-166 | RASSYIGGELW | SGTSGLQS | GQAAKRPFT |
| DOM26h-165 | RASVKIGERLW | RDASLLQS | GQSWMRPYT |
| DOM26h-167 | RASSWINSDLV | AGGSLLQS | GQYLEEPYT |
| Seq ID No. s | 14-27 | 28-41 | 42-55 |

[0177] CDR sequences (determined using the method of Kabat) of clones specific for the mouse liver cell line Hepal clc7 are described in the Table 3 below:

TABLE 3

| dAb | CDR1 | CDR2 | CDR3 |
|---|---|---|---|
| DOM26m-7 | DDYEMG | LISAQGRV | NSPSYLLNFDY |
| DOM26m-20 | RASKYIGSDLY | GGGSRLQS | GQKWARPLT |
| DOM26m-29 | EDSGMI | GIASEGST | SGLSFDY |
| DOM26m-33 | AKYDMI | GINHSGSR | SGSSFDY |
| DOM26m-50 | RASISIYEHLN | WDSSGLQS | VQHHSHPPT |
| DOM26m-52 | REHPMS | SISKHGSE | SVREFDY |
| DOM26m-54 | RASLNIDTDLV | AGWSGLQS | GQFAREPFT |
| DOM26m-58 | RASQPIRNALT | YRTSHLQS | QQTWTMPLT |
| Seq ID No. s | 56-63 | 64-71 | 72-79 |

[0178] Lead dAbs were analysed by size exclusion chromatography with multi-angle LASER light scattering (SEC-MALLS) to determine whether they were monomeric or formed higher order oligomers in solution. SEC-MALLS was carried out as follows. Proteins (at a concentration of 1 mg/mL in Dulbecco's PBS or 0.1 M Tris-Glycine, pH 8.0) were separated according to their hydrodynamic properties by size exclusion chromatography (column: TSK3000; S200). Following separation, the propensity of the protein to scatter light is measured using a multi-angle LASER light scattering (MALLS) detector. The intensity of the scattered light while protein passes through the detector is measured as a function of angle. This measurement taken together with the protein concentration determined using the refractive index (RI) detector allows calculation of the molar mass using appropriate equations (integral part of the analysis software Astra v.5.3.4.12). Results are shown in Table 4 below.

TABLE 4

| | Mean Molar mass | | |
|---|---|---|---|
| Name | over main peak | | In-solution state |
| DOM26m-7 | 14.5 | kDa | monomer (65%) |
| | 28 | kDa | dimer (25%) |
| | 49 | kDa | tetramer (10%) |
| DOM26m-20 | 13 | kDa | monomer (100%) |
| *DOM26m-29 | ? | kDa | monomer/dimer (80%) |
| | 42 | kDa | trimer/tetramer (20% |
| DOM26m-33 | 15.6 | kDa | monomer (90%) |
| DOM26m-50 | 12 | kDa | monomer (100%) |
| DOM26m-52 | 29 | kDa | dimer (70%) |
| DOM26m-54 | Not determined | | Not determined |
| | (protein failed to | | (protein failed to elute) |
| | elute) | | |
| DOM26m-58 | 14 | kDa | monomer (100%) |
| DOM26h-25 | 13.8 | kDa | Monomer |
| DOM26h-34 | 12.6 | kDa | Monomer |
| DOM26h-61 | 31 | kDa | dimer (45%) |
| | 41 | kDa | tri/tetramer (35%) |
| | 100 | kDa | octamer (10%) |
| | HMWS | | soluble aggregate (5%) |
| DOM26h-99 | 22.2 | kDa | dimer (95%) |
| | 7 | kDa | contaminant(5%) |
| DOM26h-104 | 17 | kDa | monomer/dimer (80%) |
| DOM26h-110 | 20 | kDa | monomer/dimer (90%) |
| DOM26h-159 | 17.7 | kDa | monomer/dimer (90%) |
| DOM26h-161 | 12.6 | kDa | Monomer |
| DOM26h-162 | 12.3 | kDa | Monomer |
| DOM26h-163 | 18 | kDa | monomer/dimmer |
| DOM26h-164 | 17 | kDa | monomer |
| DOM26h-165 | 13.2 | kDa | Monomer |
| DOM26h-166 | 12.6 | kDa | Monomer |
| DOM26h-167 | 18 | kDa | Monomer |

*= main peak elutes at the buffer front, hence no Mw determination was possible

[0179] Lead dAbs were also analysed by differential scanning calorimetry (DSC) to determine the apparent melting temperature. DSC was carried out as follows. Protein was heated at a constant rate of 180° C./hrs (at 1 mg/mL in PBS) and a detectable heat change associated with thermal denaturation measured. The transition midpoint (appTm) is determined, which is described as the temperature where 50% of the protein is in its native conformation and the other 50% is denatured. Here, DSC determined the apparent transition midpoint (appTm) as most of the proteins examined do not fully refold. The higher the Tm, the more stable the molecule. The software package used was OriginR v7.0383. Results are shown in Table 5 below.

TABLE 5

| | App Tm | App Tm |
|---|---|---|
| Name | 1/° C. | 2/° C. |
| DOM26m-7 | 62.0 | 63.7 |
| DOM26m-20 | 63.3 | 63.2 |
| DOM26m-29 | 61.4 | — |
| DOM26m-33 | 60.9 | 60.8 |
| DOM26m-50 | 72.4 | — |
| DOM26m-52 | 61.0 | 64.9 |
| DOM26m-54 | 62.2 | 62.2 |
| DOM26m-58 | 62.9 | 62.7 |
| DOM26h-25 | 60.5 | 61.7 |
| DOM26h-34 | 57.1 | 60.2 |
| DOM26h-61 | 61.7 | 66.6 |
| DOM26h-99 | 57.0 | 60.0 |
| DOM26h-104 | 60.0 | 64.0 |
| DOM26h-110 | 57.8 | 59.6 |
| DOM26h-159 | 62.7 | 65.4 |
| DOM26h-161 | 64.9 | — |
| DOM26h-162 | 58.2 | 67.2 |
| DOM26h-163 | 58.2 | 66.6 |
| DOM26h-164 | 55.1 | 73.3 |
| DOM26h-165 | 64.3 | — |
| DOM26h-166 | 62.7 | — |
| DOM26h-167 | 63.4 | — |

In some cases App Tm 2 could not be determined due to insufficient refolding of protein after determination of App Tm 1 (DOM26m-29, DOM26m-50 and DOM26h-161 for example) or because the molecule unfolds via a single transition (as in the case of DOM26h-161, DOM26h-165, DOM26h-166 and DOM26h-167).

### Example 4

[0180] Analysis of ASGPR-Specific dAb Binding to Murine Liver Cell Lines by Immunofluorescence Confocal Microscopy

[0181] In order to study cell surface binding, internalisation and intracellular localisation of ASGPR specific dAbs confocal microscopy assays were developed. Briefly, cells were grown on glass chamber slides and incubated with 5 μM ASGPR specific dAbs with a c-terminal FLAG epitope tag at 37° C. for 45 minutes. Cells were then fixed with 2% formaldehyde at room temperature for 10 minutes. Following washing with 5%FCS/PBS the cells were then co-stained with and either a rabbit polyclonal antibody specific to early endosomal antigen 1 (EEA1) as an early endosomal marker or rabbit polyclonal specific to lysosomal associated membrane protein 1 (LAMP1) as a lysosomal marker. The antibodies were diluted in 5%FCS/PBS including Saponin at a final concentration of 0.2% and incubated at room temperature for 1 hour with the cells. Following washing steps, the dAbs and polyclonal antibodies were detected using an anti-FLAG M2-Cy3 conjugated monoclonal and anti-rabbit Alexa Fluor 488 antibody respectively. The cells were also co-stained with 4′,6-diamidino-2-phenylindole (DAPI) as a marker for DNA. The cells were prepared for imaging and visualised using confocal microscopy.

[0182] The results showed that the murine ASGPR specific dAb clone DOM26m-33 bound to the murine liver cell line Hepal clc7 and was internalised into early endosomes, as shown by partial co localisation of anti-FLAG and anti-EEA1 staining (FIG. 5). However, the staining pattern was predominantly cell surface indicating that no significant internalisation is occurring. Under no circumstances was co localisation of anti-FLAG and LAMP1 staining observed, therefore it seems likely that ASGPR specific dAb clone DOM26m-33 is not targeted for degradation in the lysosome.

[0183] No staining of L929 murine fibroblast negative control cells with DOM26m-33 was observed, demonstrating that the staining pattern observed with this dAb in experiments with the Hepal clc7 line was liver cell specific. Similarly no staining of Hepal clc7 with VH germline sequence VHD2 was observed.

### Example 5

[0184] Epitope Mapping by Surface Plasmon Resonance

[0185] After coating a BlAcore CM5 chip with (His)₆ mouse ASGPR H1, protein A or protein L purified dAb proteins were injected one after the other and in combination over the same antigen surface. The resulting binding RUs were determined in order to see whether the maximal binding capacity of the chip by one dAb molecule can be exceeded by simultaneously injecting a second dAb onto the same antigen surface. If so, the second dAb clearly binds a different epitope compared to the first one. 1 μM concentrations of each dAb were injected at a flow rate of 10 μl per second, both in single injection and co-injection experiments. If injection of the second dAb in the presence of the first dAb reduced the observed binding to the chip surface by greater than 20% (in comparison to observed binding of the second dAb to the chip surface in the absence of the first dAb) both dAbs were assumed to bind overlapping epitopes within the antigen (FIG. 6). Based on results obtained in these experiments murine ASGPR specific dAb clones could be grouped according to epitopes bound within the antigen as shown in FIG. 12.

[0186] Epitope mapping by BlAcore shows that several distinct epitopes within the (His)₆ mouse ASGPR H1 antigen are bound by these 8 clones. Epitope mapping data also show that Vκ and V_{H} clones bind to overlapping epitopes in some cases, therefore all 8 clones were used to generate further libraries for affinity maturation.

### Example 6

[0187] Binding of ASPGR Specific dAbs to Murine Liver In Vivo

[0188] Anti-mouse ASGPR dAb DOM26m-33 and Vκ dummy/V_{H} dummy 2 germline control dAbs were used to generate point mutations such that the arginine residue at the C-terminus of Vκ clones and the serine residue at the C-terminus of V_{H} clones was mutated to cysteine. Therefore Vκ dummy carried the point mutation R108C, V_{H} dummy 2 carried the point mutation S127C and DOM26m-33 carried the point mutation S116C. dAbs were amplified from pDOM10 by PCR using primers DOM008 and PBS-ECVH2 for V_{H} dAbs and primers DOM008 and PBS-ECVK2 for Vκ clones. Oligonucleotide sequences are shown in Table 6 below.

TABLE 6

| | | |
|---|---|---|
| DOM008 | AGCGGATAAC AATTTCACAC AGGA | PUC reverse primer sequence complementary |
| | (Seq ID No. 80) | to region of pDOM10 vector upstream of |
| | | leader and dAb sequence. Adds a SalI site for |
| | | cloning into pDOM10. |
| PBS- | CTAGCGTTGGCTTTGCGGCCGCGGATCCTTA | 3′ reverse primer for VH domains. Changes |
| ECVH2 | TTAGCACGAGACGGTGAC | terminal serine to a cysteine. Also adds a NotI |
| | (Seq ID No. 81) | site for cloning into pDOM10. |
| PBS- | AGCCGGATCCGCGGCCGCTTATTAGCATTTG | 3′ reverse primer for V_{κ} domains. Changes |
| ECVK2 | ATTTCCACCTTGGTCCC | terminal arginine to cysteine. Also adds a NotI |
| | (Seq ID No. 82) | site for cloning into pDOM10. |

[0189] dAb inserts were then digested with SalI and NotI restriction enzymes and cloned into the corresponding sites in pDOM10. dAbs were expressed in 500 ml cultures (OnEX plus carbenicillin) for 3 days at 30° C. and purified on protein A (V_{H} dAbs) or protein L (Vκ dAbs). dAbs were then conjugated with DOTA-Maleimide and labeled with ¹¹¹In. Briefly, dAb solution (and all buffers used in the conjugation method) was passed through Chelex 100 resin to remove cations. Chelex treated dAb solution was then reduced by addition of 0.5M TCEP, 1% (v/v). After 30 minutes reducing agent was removed by size exclusion chromatography using a PD10 column. Conjugation was carried out overnight at room temperature by addition of 30 fold molar excess of DOTA-Maleimide dissoloved in 25 mM HEPES, pH 7. DOTA-Maleimide conjugated dAb was purified from the reaction mixture using protein A streamline resin and eluted in 0.1 M Glycine, pH2. Eluate was neutralized by addition of 1/10 volume 1 M Tris, pH 8.0. 1/3 volume 2 M ammonium actetate was then added to neutralized eluate to adjust pH to 5.5 and protein concentration calculated by measuring absorbance at 280 nm. The degree of conjugation was determined by mass spectrometric analysis. Purified DOTA-Maleimide conjugated dAb solution was then radiolabeled in 35 μl reaction volumes by addition of 5-20 μl ¹¹¹InCl₃ (dissolved in 0.05 M HCl) and 1-4 μl of 1 M ammonium acetate, pH 5.5 to 25 μg DOTA-Maleimide conjugated dAb. Reaction was allowed to proceed at 37° C. for 1-3 hours before radiolabelling efficiency was analysed using thin layer chromatography. Following successful radiolabelling reaction mixture was quenched using 0.001% (v/v) 0.1 M EDTA. Approximately 12 MBq radiolabeled dAb was injected into isofluorane anaesthetized balb/c mice intravenously via the tail vein before imaging over a 7 day time course using the Nanospect/CT preclinical in vivo imaging system. Analysis of images showed that in mice injected with ¹¹¹In labeled DOM26m-33 signal was observed in the kidney, bladder and liver after 3 hours (FIG. 7). However in Mice injected with ¹¹¹In labeled Vκ dummy or V_{H} dummy 2 no signal was observed in the liver over 7 days post injection, therefore liver specific binding of DOM26m-33 in vivo is a direct consequence of ASGPR binding. Signal was observed in the kidney and bladder in all cases due to excretion via this route. In order to quantitatively determine the in vivo distribution of ¹¹¹In labeled dAbs whole body autoradiography experiments were carried out. Balb/c mice were dosed with approximately 0.5 MBq of radiolabelled dAb as above. Mice were then sacrificed 3 hours after injection before removing organs and counting in a gamma counter. Counts detected in various organs were expressed as percent injected dose. Results of these experiments show that counts in the liver of mice injected with DOM26m-33 were 12.4 times higher compared to counts in the liver of mice injected with Vκ dummy and 4.9 times higher compared to counts in the liver of mice injected with V_{H} dummy 2 (FIG. 8).

### Example 7

[0190] Cloning and Expression of Murine Interferon Alpha Fused to ASGPR Specific dAbs

[0191] Mouse Interferon-alpha 2 cDNA was custom synthesised by DNA2.0. DNA encoding the full length protein (without the signal peptide sequence) with a partial linker sequence (described below) and an AvrII restriction site appended to the c-terminus, was amplified by PCR using primers DX132 and DX133. Oligonucleotide sequences are shown in Table 7 below.

TABLE 7

| | | |
|---|---|---|
| DX132 | GGATCCACCGGCTGCGATCTGCCTCACACT | Addition of 5′ BamHI to Mouse |
| | TA (Seq ID No. 83) | IFNa2 for cloning into pDOM50 |
| DX133 | CCTAGGAGCGGCGACGGTCTCCTTCTCTTC | Addition of 3′ TVAAPS and AvrII |
| | ACTCAGTCT (Seq ID No. 84) | site to Mouse IFNa2 for cloning |
| | | into pDOM50 |

[0192] PCR fragments were inserted into holding vector pCR-Zero Blunt (Invitrogen) by Topoisomerase cloning and sequenced to obtain error-free clones using M13 forward amd M13 reverse primers. Mouse IFNa2 encoding DNA was obtained by gel purification following BamHI/AvrII digestion of pCR-Zero Blunt containing the insert and inserts ligated into the corresponding sites in pDOM50 to produce the vector pDOM38mIFN-N1.

[0193] Anti-mouse ASGPR dAbs (or germline control dAbs Vκ dummy and V_{H} dummy 2) were then cloned into pDOM38mIFN-N1 to produce Mouse IFNa2 fused at the C-terminus to dAb sequence with the intervening linker sequence TVAAPS as described below:

[0194] Following PCR amplification of dAb nucleotide sequence with primers DX008 and DX018 for Vκ clones or DX009 and DX019 for V_{H} clones PCR fragments were inserted into holding vector and sequenced to obtain error-free clones as above. DNA encoding dAb sequence was obtained by gel purification following NheI/HindIII digestion of pCR-Zero Blunt containing the insert and inserts ligated into pDOM38mIFN-N1 digested with AvrII/HindIII.

[0195] Constructs with c-terminal residue of dAb mutated to cysteine was also produced as above, except antisense primers used in place of DX018 and DX019 were DLT048 for Vκ clones and DLT049 for V_{H} clones. Oligonucleotide sequences are shown in Table 8 below.

TABLE 8

| | | |
|---|---|---|
| DX008 | GCTAGCGACATCCAGATGACCCAG | Addition of 5′ NheI to V_{κ} for cloning into |
| | TCTCCAT (Seq ID No. 85) | pDOM38mIFN-N1 |
| DX009 | GCTAGCGAGGTGCAGCTGTTGGA | Addition of 5′ NheI to V_{H} for cloning into |
| | GTCTGGG (Seq ID No. 86) | pDOM38mIFN-N1 |
| DX018 | AAGCTTTTATTACCGTTTGATTTCC | Addition of 3′ 2× STOP and HindIII to V_{κ} for |
| | ACCTTGGTCCC (Seq ID No. 87) | cloning into pDOM38mIFN-N1 |
| DX019 | AAGCTTTTATTAGCTCGAGACGGT | Addition of 3′ 2× STOP and HindIII to V_{H} for |
| | GACCAGGGTTCCC | cloning into pDOM387h-14-N1 |
| | (Seq ID No. 88) | |
| DLT048 | AAGCTTTTATTAGCATTTGATTTCC | Addition of 3′ 2× STOP and HindIII to V_{κ} for |
| | ACCTTGGTCCC | cloning into pDOM38mIFN-N1. Also mutates |
| | (Seq ID No. 89) | C-terminal serine to cysteine. |
| DLT049 | AAGCTTTTATTAGCACGAGACGGT | Addition of 3′ 2× STOP and HindIII to V_{H} for |
| | GACCAGGGTTCC | cloning into pDOM38mIFN-N1. Also mutates |
| | (Seq ID No. 90) | C-terminal serine to cysteine. |

Linker Sequence (amino acid):
(Seq ID No. 91)
TVAAPS
Linker Sequence (nucleotide):
(Seq ID No. 92)
ACCGTCGCCGCTCCTAGC

[0196] Plasmid DNA was prepared using QIAfilter megaprep (Qiagen). 1 μg DNA/ml was transfected with 293-Fectin into HEK293E cells and grown in serum free media. The protein is expressed in culture for 5 days and purified from culture supernatant using protein L streamline resin, eluted with 0.1 M glycine pH 2.0 and neutralised with 1 M Tris pH 8.0. The proteins were buffer exchanged into PBS. Purity was assessed by reducing SDS-PAGE as above (FIG. 9).

[0197] Interferon activity of mouse IFNa2-dAb fusions was assayed using a luciferase reporter assay (CHO-ISRE Luc assay). CHO-Kl cells were transiently transfected with the luciferase reporter construct pISRE-Luc (Clontech; http://www.clontech.com/images/pt/PT3372-5.pdf). Following overnight incubation transfected cells were plated onto 96 well microtitre plates and incubated for 4 hours at 37° C. before treatment with mouse IFNa2-dAb fusions for one hour. IFN-stimulated cells were then treated with Bright-Glo Luciferase reagent (http://www.promega.com/tbs/tm052/trn052.pdf) and read on a Wallac microplate reader. Recombinant mouse Interferon-alpha expressed in E coli (PBL Biomedical Laboratories) was used as a standard. Results show that mouse IFNa2-dAb fusions are active in this assay (FIG. 10).

[0198] ASGPR binding activity of mouse IFNa2-dAb fusions was also tested by biacore as above. DOM26m-33 binding activity was retained in the context of an in-line fusion to mouse IFNa2 (FIG. 11).

[0199] Sequences:

Mouse IFNa2
(Seq ID No. 93)
CDLPHTYNLRNKRALKVLAQMRRLPFLSCLKDRQDFGFPLEKVDNQQIQK
AQAIPVLRDLTQQTLNLFTSKASSAAWNTTLLDSFCNDLHQQLNDLQTCL
MQQVGVQEPPLTQEDALLAVRKYFHRITVYLREKKHSPCAWEVVRAEVWR
ALSSSVNLLPRLSEEKE
(Seq ID No. 94)
TGCGATCTGCCTCACACTTATAACCTCAGGAACAAGAGGGCCTTGAAGGT
CCTGGCACAGATGAGGAGGCTCCCCTTTCTCTCCTGCCTGAAGGACAGGC
AGGACTTTGGATTCCCCCTGGAGAAGGTGGATAACCAGCAGATCCAGAAG
GCTCAAGCCATCCCTGTGCTGCGAGATCTTACTCAGCAGACCTTGAACCT
CTTCACATCAAAGGCTTCATCTGCTGCTTGGAATACAACCCTCCTAGACT
CATTCTGCAATGACCTCCACCAGCAGCTCAATGACCTGCAAACCTGTCTG
ATGCAGCAGGTGGGGGTGCAGGAACCTCCTCTGACCCAGGAAGACGCCCT
GCTGGCTGTGAGGAAATATTTCCACAGGATCACTGTGTACCTGAGAGAGA
AGAAACACAGCCCCTGTGCCTGGGAGGTGGTCAGAGCAGAAGTCTGGAGA
GCCCTGTCTTCCTCAGTCAACTTGCTGCCAAGACTGAGTGAAGAGAAGGA
G

### Example 8

[0200] Affinity Maturation of DOM26m and DOM26h Leads

[0201] Error-prone PCR libraries were assembled for clones DOM26m-20, -50, -29, -33, -52 and DOM26h-61, -99, -104, -110 and -159. The parent clones in pDOM5 vector were subjected to two rounds of error-prone PCR using GeneMorph II kit (Stratagene). In the PCR reaction 0.75 μg of vector was amplified for 30 cycles using primers AS9 and AS339, according to manufacturer's protocol. In the second round of amplification 0.1 μl of the first amplification reaction product was reamplified in 100 ill volume for 35 cycles using primers AS639 and AS65. The reaction product was purified by electrophoresis using 2% E-Gels (Invitrogen) and Qiagen Gel Purification kit (Qiagen). The purified reaction product was cut with 200 units of Sal I (High concentration, NEB) and 100 units Not I (High concentration, NEB) in 100 μl volume at 37C for 18 hours. The digested DOM26m and DOM26h inserts were gel purified using 2% E-gels and eluted into 20 μl of water.

[0202] Each library insert was ligated into 1 μl of 30 nM pIE2a²A vector (see WO2006018650) using T4 DNA Ligase (NEB) in an overnight reaction at 160C in 25 μl volume. An aliquot of 0.1 μl of the ligated library was used to quantify the number of ligated vector molecules. The reaction yield in the form of circularized vectors was measured by qPCR (Mini-Opticon, iQ SYBR Green pre-mix, Bio-Rad cat no. 170-8880) using primers AS79 and AS80 (p174, R17058). Amplification cycles were: 2 min 94° C., followed by 40 cycles of 15 sec 94° C., 30 sec 60° C. and 30 sec 72° C. . The amount of DNA was quantified on a BioRad MiniOpticon Real-Time PCR Machine (Bio-Rad Laboratories, Hercules Calif.) and analysed using Opticon Monitor version 3.1.32 (2005) software provided by Bio-Rad Laboratories. Standard curve from a sample of known DNA concentration covered the range from 500 to 5×10⁸ molecules per reaction.Typical reaction yield (of independent ligations that equals to library diversity) varied between 2×10⁸ and 2×10⁹ circularized copies of vector per reaction.

[0203] 0.5 μl of the ligation mix was also used to transform a 10 μl of XL10-Gold cells (Stratagene). The inserts from the colonies were amplified using primers AS79 and AS80, SuperTaq DNA polymerase. The reaction products were purified using Millipore Multiscreen plates and 8 clones were sequenced for each library using T7 primer. On average, the libraries contained 1.8-2.8 amino acid mutations per gene (p179, R17058).

[0204] The rest of the ligation mix was PCR amplified in 15 μl volume using SuperTaq DNA polymerase with primers AS 11 and AS 17 to generate the PCR fragments required for the selection.

### Selections

[0205] Nine rounds of selection were carried out in total, whilst keeping all the libraries separate and using a series of nested primer sets AS12+AS18, AS13+AS19, AS14+AS20, AS15+AS21, AS16+AS22, AS29+AS153, AS106+AS154, AS109+AS155 and AS98+AS156, according to the method described in WO2006018650, except that KOD Hot-Start DNA polymerase (Merck) was used throughout the process. In the first round of selection 5×10⁹ molecules of library were emulsified in 1 ml of emulsion, whereas in the subsequent eight rounds 5×10⁸ molecules per reaction were used. Affinity capture of protein DNA complexes was carried out using mouse ASGPR biotinylated with NHS-LC-biotin (Pierce, according to manufacturer's protocol). M280 Streptavidin Dynabeads at 3×10⁷ beads per reaction (Invitrogen) were used throughout to capture ligand-dAb-DNA complexes. 4-6 fmol of mouse ASGPR was pre-coated onto beads (in round 1) or used in solution 200 μl volume during the capture phase (rounds 2-9).

[0206] Following the final round of selection, the amplified DNA was cut with SalI/NotI enzymes and the dAb insert gel purified on 2% E-Gel. The purified insert was cloned into SalI/NotI-cut pDOM10 vector and transformed into Machl Chemically competent cells (Invitrogen). 96 colonies were picked for each library. The bacterial colonies were used to run PCR reactions and to inoculate 100 μl stock LB and 600 μl TB/OnEx (Merck) cultures. The TB/OnEx cultures were used for autoinduction expression during 72 h incubation at 300 C, 750 RPM in 2.2 ml DeepWell plates. The expression products were screened on BlAcore using HBS-P buffer and SA chips (all BIAcore) coated with biotinylated proteins, human ASGPR in channel 2, mouse ASGPR in channel 3 and either protein A or protein L in channel 4. Channel 1 was left uncoated. The colony PCR was performed using SuperTaq with primers AS9 and AS65. The PCR reaction products were purified using Multiscreen plates (Millipore) and sequenced using M13 reverse primer.

[0207] Results

[0208] A number of clones were identified by sequence enrichment (DOM26m-20 and DOM26h-61 libraries) or BlAcore screening of supernatants (DOM26m-52 library). No improved clones or sequence enrichments were observed for the rest of the libraries.

[0209] Further affinitiy maturation of DOM26m and DOM26h leads was carried out using doped libraries. Libraries were assembled by PCR using SuperTaq DNA polymerase and targetd dAb genes in pDOM5 vector. The doped oligonucleotides consisted of fixed positions (indicated by a capital letter and in which case 100% of oligonucleotides have the indicated nucleotide at that position) and mixed nucleotide composition, indicated by lower case in which case 85% of oligonucleotides will have the dominant nucleotide at this position and 15% will have an equal split between the remaining three nucleotides.

[0210] DOM26m-20: In the first reaction CDR1 of DOM26m-20 was randomized using oligonucleotides AS9 and AS1253, while CDR2 was randomized using oligonucleotides AS1257 and AS339. The reaction products were gel purified, mixed and spliced by SOE-PCR (Horton et al. Gene, 77, p61 (1989)) using primers AS65 and AS639 as secondary nested primers, providing a library with both CDR1 and CDR2 randomisation. CDR3 was randomized using primersAS9 and AS 1259.

[0211] DOM26m-50: In the first reaction CDR1 of DOM26m-20 was randomized using oligonucleotides AS9 and AS1254, while CDR2 was randomized using oligonucleotides AS1258 and AS339. The reaction products were gel purified, mixed and spliced by SOE-PCR using primers AS65 and AS639 as secondary nested primers, providing a library with both CDR1 and CDR2 randomisation. CDR3 was randomized using primersAS9 and AS 1260.

[0212] DOM26m-29: In the first reaction CDR1 of DOM26m-20 was randomized using oligonucleotides AS9 and AS1261, while CDR2 was randomized using oligonucleotides AS1267 and AS339. The reaction products were gel purified, mixed and spliced by SOE-PCR using primers AS65 and AS639 as secondary nested primers, providing a library with both CDR1 and CDR2 randomisztion. CDR3 was randomized using primersAS9 and AS 1270.

[0213] DOM26m-33: In the first reaction CDR1 of DOM26m-20 was randomized using oligonucleotides AS9 and AS1262, while CDR2 was randomized using oligonucleotides AS1268 and AS339. The reaction products were gel purified, mixed and spliced by SOE-PCR using primers AS65 and AS639 as secondary nested primers, providing a library with both CDR1 and CDR2 randomisation. CDR3 was randomized using primersAS9 and AS 1271.

[0214] DOM26h-99: Separate libraries for each CDR was assembled by SOE-PCR. CDR1: the first amplifications with primer pairs AS1290+AS339 and AS9+AS1310 for CDR1, AS 1294+AS339 and AS9+AS1278 for CDR2 and AS1298+AS339 and AS9+AS1304 for CDR3. The amplification products for individual CDRs were mixed, spliced by SOE PCR and reamplified using primers AS639 and AS65.

[0215] DOM26h-159: Separate libraries for each CDR was assembled by SOE-PCR. CDR1: the first amplifications with primer pairs AS1322+AS339 and AS9+AS1310 for CDR1, AS 1323+AS339 and AS9+AS1278 for CDR2 and AS1324+AS339 and AS9+AS1304 for CDR3. The amplification products for individual CDRs were mixed, spliced by SOE PCR and reamplified using primers AS639 and AS65.

[0216] DOM26m-52-3: The first amplifications were carried out with primer pairs AS1287+AS339 and AS9+AS1263 for CDR1, AS1325+AS339 and AS9+AS1327 for CDR2 (first library), AS1326+AS339 and AS9+AS1327 for CDR2 (second library), and AS9+AS1272 for CDR3. The amplification products for individual CDRs1-2 were mixed, spliced by SOE PCR and reamplified using primers AS639 and AS65.

[0217] All assembled library fragments were gel purifed, SalI/NotI cut and ligated into pIE2a²A vector as described above, with ligation yields exceeding 10⁹ independent ligations per reaction, as measured by qPCR and described above. (23, 27, 28 R17479)

[0218] Selections

[0219] Nine rounds of selection were carried out in total, whilst keeping all the libraries separate and using a series of nested primer sets AS12+AS18, AS13+AS19, AS14+AS20, AS15+AS21, AS16+AS22, AS29+AS153, AS106+AS154, AS109+AS155 and AS98+AS156, as described above. In the first round of selection 2.5×10⁹ molecules of library were emulsified in 1 ml of emulsion, whereas in the subsequent eight rounds 5×10⁸ molecules per reaction were used. Affinity capture of protein DNA complexes was carried out using mouse or human ASGPR biotinylated with NHS-LC-biotin (Pierce, according to manufacturer's protocol). M280 Streptavidin Dynabeads at 3×10⁷ beads per reaction (Invitrogen) were used throughout to capture ligand-dAb-DNA complexes. 2-6 fmol of mouse ASGPR was pre-coated onto beads (in round 1) or used in solution 200 μl volume during the capture phase (rounds 2-9).

[0220] Following the final round of selection, the amplified DNA was cut with SalI/NotI enzymes and the dAb insert gel purified on 2% E-Gel. The purified insert was cloned into SalI/NotI-cut pDOM10 vector and transformed into Machl Chemically competent cells (Invitrogen). 96 colonies were picked for each library and processed as described above for the error-prone PCR library.

[0221] Results

[0222] A number of clones were identified by sequence enrichment (DOM26m-20 and DOM26h-61 libraries) or BlAcore screening of supernatants (DOM26m-52 library). No improved clones or sequence enrichments were observed for the rest of the libraries.

[0223] Oligonucleotide sequences are shown in Table 9 below:

TABLE 9

| | |
|---|---|
| AS9 | CAGGAAACAGCTATGACCATG Seq ID No. 95 |
| AS11 | TTCGCTATTACGCCAGCTGG Seq ID No. 96 |
| AS12 | AAAGGGGGATGTGCTGCAAG Seq ID No. 97 |
| AS13 | AAGGCGATTAAGTTGGGTAAC Seq ID No. 98 |
| AS14 | CCAGGGTTTTCCCAGTCAC Seq ID No. 99 |
| AS15 | GAGATGGCGCCCAACAGTC Seq ID No. 100 |
| AS16 | CTGCCACCATACCCACGCC Seq ID No. 101 |
| AS17 | CAGTCAGGCACCGTGTATG Seq ID No. 102 |
| AS18 | AACAATGCGCTCATCGTCATC Seq ID No. 103 |
| AS19 | TCGGCACCGTCACCCTGG Seq ID No. 104 |
| AS20 | TGCTGTAGGCATAGGCTTGG Seq ID No. 105 |
| AS21 | CCTCTTGCGGGATATCGTC Seq ID No. 106 |
| AS22 | TCCATTCCGACAGCATCGC Seq ID No. 107 |
| AS29 | GAAACAAGCGCTCATGAGCC Seq ID No. 108 |
| AS65 | TTGTAAAACGACGGCCAGTG Seq ID No. 109 |
| AS79 | GGCGTAGAGGATCGAGATC Seq ID No. 110 |
| AS80 | TTGTTACCGGATCTCTCGAG Seq ID No. 111 |
| AS98 | CCAGCAACCGCACCTGTG Seq ID No. 112 |
| AS106 | AGTGGCGAGCCCGATCTTC Seq ID No. 113 |
| AS109 | CGATATAGGCGCCAGCAACC Seq ID No. 114 |
| AS153 | CAGTCACTATGGCGTGCTGC Seq ID No. 115 |
| AS154 | TAGCGCTATATGCGTTGATGC Seq ID No. 116 |
| AS155 | TTCTATGCGCACCCGTTCTC Seq ID No. 117 |
| AS156 | AGCACTGTCCGACCGCTTTG Seq ID No. 118 |
| AS339 | TTCAGGCTGCGCAACTGTTG Seq ID No. 119 |
| AS639 | CGCCAAGCTTGCATGCAAATTC Seq ID No. 120 |
| AS1253 | GGCTTTACCTGGTTTCTGCTGGTACCAATAMAAMTCMCTMCCMA |
| | TATAMTTMCTMGCMCGGCAAGTGATGGTGACACGG |
| | Seq ID No. 121 |
| AS1257 | TATTGGTACCAGCAGAAACCAGGTAAAGCCCCTAAGCTCCTGAT |
| | KGGKGGKGGKTCKCGKTTKCAKAGTGGGGTCTCATC |
| | Seq ID No. 122 |
| AS1259 | TGTGTGTGGCGGCCGCCCGTTTGATTTCCACCTTGGTCCCTTGG |
| | CCGAACGTMAGMGGMCTMGCMCAMTTMTGMCCMCAGTAGTACG |
| | TAGC Seq ID No. 123 |
| AS1254 | GGCTTTCCCTGGTTTCTGCTGGTACCAATTMAAMTGMTCATAMA |
| | TMCTMATMCTMGCMCGGCAAGTGATGGTGACACGG |
| | Seq ID No. 124 |
| AS1258 | AATTGGTACCAGCAGAAACCAGGGAAAGCCCCTACGCTCCTGAT |
| | KTGKGAKTCKTCKGGKTTKCAKAGTGGGGTCCCATC |
| | Seq ID No. 125 |
| AS1260 | TGTGTGTGGCGGCCGCCCGTTTGATTTCCACCTTGGTCCCTTGG |
| | CCGAACGTMGGMGGMTGMCTMTGMTGMTGMACMCAGTAGTACGT |
| | AGC Seq ID No. 126 |
| AS1261 | TGAGACCCACTCCAGACCCTTCCCTGGAGCCTGGCGGGCCCAMA |
| | TMATMCCMCTMTCMTCAAAGGTGAATCCGGAG |
| | Seq ID No. 127 |
| AS1262 | TGAGACCCACTCTAGACCCTTCCCTGGAGCCTGGCGGACCCAMA |
| | TMATMTCATAMTTMGCAAAGGTGAATCCGGAG |
| | Seq ID No. 128 |
| AS1263 | TGAGACCCACTCTAGACCCTTCCCTGGAGCCTGGCGGACCCAMC |
| | TMATMGGMTGMTCMCTAAAGGTGAATCCGGAG |
| | Seq ID No. 129 |
| AS1267 | CTCCAGGGAAGGGTCTGGAGTGGGTCTCAGGKATKGCKTCKGAK |
| | GGKAGKACKACKTACTACGCKGAKTCKGTKAAKGGKCGGTTCAC |
| | CATC Seq ID No. 130 |
| AS1268 | CTCCAGGGAAGGGTCTAGAGTGGGTCTCAGGKATKAAKCAKTCK |
| | GGKTCKCGKACKTACTACGCKGAKTCKGTKAAKGGKCGGTTCAC |
| | CATC Seq ID No. 131 |
| AS1270 | TGTGTGTGGCGGCCGCGCTCGAGACGGTGACCAGGGTTCCCTGA |
| | CCCCAGTAMTCMAAMGAMAGMCCMGATTTCGCACAGTAATA |
| | Seq ID No. 132 |
| AS1271 | TGTGTGTGGCGGCCGCGCTCGAGACGGTGACCAGGGTTCCCTGA |
| | CCCCAGTAMTCMAAMGAMGAMCCMGATTTCGCACAGTAATA |
| | Seq ID No. 133 |
| AS1272 | TGTGTGTGGCGGCCGCGCTCGAGACGGTGACCAGGGTTCCCTGA |
| | CCCCAGTAMTCMAAMTCMCGMACMGATTTCACACAGTAATA |
| | Seq ID No. 134 |
| AS1278 | TGAGACCCACTCTAGACCCTTCCCTGGAGCCTGGCGGACCCA |
| | Seq ID No. 135 |
| AS1287 | TGGGTCCGCCAGGCTCCAGGGAAGGGTCTAGAGTGGGTCTCA |
| | Seq ID No. 136 |
| AS1294 | GAAGGGTCTAGAGTGGGTCTCATCKATTAGKTCKACKGGKCTKA |
| | GKACKTACTACGCKGAKTCKGTGAAKGGKCGGTTCACCATCTCC |
| | CG Seq ID No. 137 |
| AS1298 | CGGTATATTACTGTGCGAAAGAKGCKTCKCGKTTKAGKCAKCCK |
| | TTKGAKTACTGGGGTCAGGGAACCCTGGTC |
| | Seq ID No. 138 |
| AS1304 | TTTCGCACAGTAATATACCGC Seq ID No. 139 |
| AS1310 | AAAGGTGAATCCGGAGGCTGCACAGGAGAGACGCAG |
| | Seq ID No. 140 |
| AS1322 | GCCTCCGGATTCACCTTTGCKGAKTATTCKATGTATTGGGTCCG |
| | CCAGGCTCCAGG Seq ID No. 141 |
| AS1323 | GAAGGGTCTAGAGTGGGTCTCAGAKATKAGKCCKTCKGGKAGKA |
| | TKACKTACTACGCKGAKTCKGTKAAKGGKCGGTTCACCATCTCC |
| | CGTGACAATTC Seq ID No. 142 |
| AS1324 | CGGTATATTACTGTGCGAAAGGKCTKCCKGGKCAKAAKATKCAK |
| | GTKGGKTTKGAKTACTGGGGTCAGGGAACCCTGGTC |
| | Seq ID No. 143 |
| AS1325 | GGGTCTCATCGATTAGTAAGCATGGTNNKNNKNNKTACTACGCA |
| | GACTCCGTG Seq ID No. 144 |
| AS1326 | GGGTCTCATCGATTAGTAAGNNKNNKNNKGTGACATACTACGCA |
| | GAC Seq ID No. 145 |
| AS1327 | CTTACTAATCGATGAGACCC Seq ID No. 146 |

### Example 9

[0224] Cloning and Expression of Human Asialoglycoprotein H1 Receptor Lectin and Stalk Domains

[0225] Full length human asialoglycoprotein receptor H1 subunit (ASGPR H1) cDNA was synthesised by DNA2.0 (see example 1). DNA encoding the stalk domain (Q62-C153) with an N-terminal (His)₆ tag was generated by site directed mutagenesis of Human (His)₆ ASGPR H1 Q62-L291 in pDOM50 expression vector (see example 1) using the Quikchange site directed mutagenesis kit (Stratagene) according to manufacturer's instructions. Primers LT020 and LT021 were used to introduce a double stop codon in this construct such that translation of Human (His)₆ ASGPR H1 Q62-L291 in pDOM50 terminates immediately after residue C153. DNA encoding the lectin domain (C154-L291) with an N-terminal (His)₆ tag was amplified by PCR using primers LT013 and LT014.

| | | |
|---|---|---|
| LT020 | CCGAGAGAACTTGCTAATAATGCCCCGTCAATTGGG | Human (His)₆ ASGPR H1 stalk |
| | (Seq ID No. 147) | domain 5′ primer |
| LT021 | CCCAATTGACGGGGCATTATTAGCAAGTTCTCTCGG | Human (His)₆ ASGPR H1 stalk |
| | (Seq ID No. 148) | domain 3′ primer |
| LT022 | GCCCGGATCCACCGGCCATCATCATCATCATCACGGG | Human (His)₆ ASGPR H1 |
| | TCGTGCCCCGTCAATTGGGTG | lectin domain 5′ primer |
| | (Seq ID No. 149) | |
| LT013 | GGGTGCCCGGATCCACCGGCCATCATCATCATCATCA | Human (His)₆ ASGPR H1 |
| | CGGGTCGCACGAGCGGTCTTGTTATTGGAGC | lectin domain 3′ primer |
| | (Seq ID No. 150) | |

[0226] PCR fragment was digested with BamHI/HindIII, gel purified and ligated into the corresponding sites in pDOM50 (see example 1).

Leader sequence (amino acid):
(Seq ID No. 5)
METDTLLLWVLLLWVPGSTG
Leader sequence (nucleotide):
(Seq ID No. 6)
ATGGAGACCGACACCCTGCTGCTGTGGGTGCTGCTGCTGTGGGTGCCCGG
ATCCACCGGGC

[0227] Plasmid DNA was prepared using QIAfilter megaprep (Qiagen). 1 μg DNA/ml was transfected with 293-Fectin into HEK293E cells and grown in serum free media. The protein was expressed in culture for 5 days and purified from culture supernatant using Ni-NTA resin and eluted with PBS+0.5 M Imidazole. The proteins were buffer exchanged into PBS.

[0228] Purity of lectin and stalk domains eluted from Ni-NTA was analysed by non-reducing SDS-PAGE (FIG. 14). SDS-PAGE analysis shows that human (His)₆-ASGPR H1 stalk domain migrates close to the expected molecular mass (10 KDa based on amino acid sequence) only when treated with 500 units of PNGase F (New England Biolabs) for 2 hours at 37° C., consistent with N-linked glycosylation of residues in the stalk domain. Human (His)₆-ASGPR H1 lectin domain migrates close to the expected molecular mass of 17.2 KDa irrespective of PNGase F treatment, indicating that the lectin domain of human ASGPR Hlis not extensively modified by N-linked glycosylation.

[0229] Sequences:

(His)₆-Human ASGPR H1 Stalk Domain
(Seq ID No. 151)
HHHHHHQNSQLQEELRGLRETFSNFTASTEAQVKGLSTQGGNVGRKMKSL
ESQLEKQQKDLSEDHSSLLLHVKQFVSDLRSLSCQMAALQGNGSERTC
(Seq ID No. 152)
CATCATCATCATCATCACCAGAACTCCCAACTCCAGGAAGAACTTCGAGG
ACTGAGGGAGACTTTCTCCAATTTCACCGCAAGCACGGAGGCTCAAGTGA
AGGGCCTCAGCACCCAGGGCGGGAATGTGGGCAGGAAAATGAAATCCCT
GGAGAGCCAGCTCGAAAAGCAGCAGAAAGATCTGTCCGAGGACCACTCT
AGCCTGTTGTTGCACGTGAAACAGTTTGTTTCCGACCTTAGGAGTCTTTC
TTGCCAAATGGCCGCCCTCCAGGGAAACGGGTCCGAGAGAACTTGC
(His)₆-Human ASGPR H1 Lectin Domain
(Seq ID No. 153)
HHHHHHGSCPVNWVEHERSCYWFSRSGKAWADADNYCRLEDAHLVVVTS
WEEQKFVQHHIGPVNTWMGLHDQNGPWKWVDGTDYETGFKNWRPEQPDD
WYGHGLGGGEDCAHFTDDGRWNDDVCQRPYRWVCETELDKASQEPPLL
(Seq ID No. 154)
CATCATCATCATCATCACGGGTCGTGCCCCGTCAATTGGGTGGAGCACGA
GCGGTCTTGTTATTGGTTTAGCCGAAGCGGAAAAGCCTGGGCCGATGCAG
ATAACTACTGCCGGCTTGAGGACGCCCATCTGGTCGTGGTGACCAGTTGG
GAGGAACAGAAATTCGTACAGCATCATATCGGGCCTGTTAACACATGGAT
GGGCCTTCATGACCAGAATGGTCCTTGGAAGTGGGTTGACGGAACCGATT
ACGAAACCGGATTCAAGAACTGGCGGCCTGAACAGCCAGACGACTGGTAT
GGACACGGCCTCGGAGGCGGGGAGGACTGCGCGCATTTCACAGACGATG
GCCGGTGGAATGATGATGTGTGCCAAAGGCCTTACAGATGGGTCTGCGAG
ACAGAGCTGGATAAGGCTTCACAAGAGCCTCCACTCCTG

### EXAMPLE 10

[0230] Surface Plasmon Resonance to Determine Binding of ASGPR dAbs to Human ASGPR Stalk Domain, Human ASGPR Lectin Domain and Mouse ASGPR Extracellular Domain

[0231] To assay for potential dAb binding activity human (His)₆-ASGPR H1 stalk domain, human (His)₆-ASGPR H1 lectin domain and mouse (His)₆-ASGPR H1 extracellular domain were biotinylated and immobilised on a biacore Streptavidin chip surface. ASGPR dAbs DOM26h-161-84, DOM26h-210-2, DOM26h-220-1 and DOM26h-196-61 with C-terminal FLAG epitope tags (expressed and purified from pDOM10 as in example 6) were passed over the chip surface at a flow rate of 40 μl.min⁻¹ and shown to bind human (His)₆-ASGPR H1 lectin domain and mouse (His)₆-ASGPR H1 extracellular domain. No binding to human (His)₆-ASGPR H1 stalk domain was observed with any of these clones (FIG. 15 shows an example of DOM26h-196-61 binding to (His)₆-ASGPR H1 stalk domain, human (His)₆-ASGPR H1 lectin domain and mouse (His)₆-ASGPR H1 extracellular domain).

### Example 11

[0232] Binding of ASPGR Lectin Domain Specific dAbs to Murine Liver In Vivo

[0233] ASGPR dAbs were expressed in 500 ml cultures (OnEX plus carbenicillin) for 3 days at 30° C. and purified on protein A (V_{H} dAbs) or protein L (Vκ dAbs). dAbs were then conjugated with DOTA-NHS and labelled with ¹¹¹In. Briefly, dAb solution (and all buffers used in the conjugation method) was passed through Chelex 100 resin to remove cations. Conjugation was carried out overnight at room temperature by addition of 4 fold molar excess of DOTA-NHS dissoloved to 20 mM in 1xPBS. DOTA-NHS conjugated dAb was purified from the reaction mixture using protein A (V_{H} dAbs) or protein L (Vκ dAbs) streamline resin and eluted in 0.1 M Glycine, pH2. Eluate was neutralized by addition of 1/10 volume 1 M Tris, pH 8.0. ⅓ volume 2 M ammonium actetate was then added to neutralized eluate to adjust pH to 5.5 and protein concentration calculated by measuring absorbance at 280 nm. The degree of conjugation was determined by mass spectrometric analysis. Purified DOTA-NHS conjugated dAb solution was then radiolabeled in 35 μl reaction volumes by addition of 5-20 μl ¹¹¹InCl₃ (dissolved in 0.05 M HCl) and 1-4 μl of 1 M ammonium acetate, pH 5.5 to 25 μg DOTA-NHS conjugated dAb. Reaction was allowed to proceed at 37° C. for 1-3 hours before radiolabelling efficiency was analysed using thin layer chromatography. Following successful radiolabelling reaction mixture was quenched using 0.001% (v/v) 0.1M EDTA.

[0234] Approximately 12 MBq radiolabelled dAb was injected into isofluorane anaesthetized balb/c mice intravenously via the tail vein before imaging over a 72 hour time course using the Nanospect/CT preclinical in vivo imaging system. Analysis of images showed that in mice injected with ¹¹¹In labeled DOM26h-161-84 and DOM26h-196-61 signal was observed in the kidney, bladder and liver after 3 hours (FIG. 16). In comparison mice injected with ¹¹¹In labeled Vκ dummy or V_{H} dummy 2 no signal was observed in the liver over 7 days post injection (FIG. 8), therefore liver specific binding of DOM26h-161-84 and DOM26h-196-61 in vivo is a direct consequence of ASGPR lectin domain binding. Signal was observed in the kidney and bladder in all cases due to excretion via this route. In order to quantitatively determine the in vivo distribution of ¹¹¹In labelled ASGPR lectin domain specific dAbs whole body autoradiography experiments were carried out. Balb/c mice were injected with approximately 0.5 MBq of radiolabelled dAb as above. Mice were then sacrificed 3 hours after injection before removing organs and counting in a gamma counter. Counts detected in various organs were expressed as percentage of injected dose. Results of these experiments show that counts in the liver of mice injected with DOM26h-196-61 were approximately 35 times higher compared to counts in the liver of mice injected with VH dummy 2. Similarly counts in the liver of mice injected with DOM26h-161-84 were 46 times higher compared to counts in the liver of mice injected with Vκ dummy (FIG. 17).

### Example 12

[0235] Cloning and Expression of Murine Interferon Alpha Fused to ASGPR Lectin Domain Specific dAbs

[0236] ASGPR lectin domain specific dAbs DOM26h-161-84 and DOM26h-196-61 were cloned into vector pDOM38mIFNa2-N1 as described in example 7. Plasmid DNA was prepared using QIAfilter megaprep (Qiagen). 1 μg DNA/ml was transfected with 293-Fectin into HEK293E cells and grown in serum free media. The protein is expressed in culture for 5 days and purified from culture supernatant using protein A or protein L streamline resin, eluted with 25 mM Na Acetate pH 3.0, neutralised with 1 M Na Acetate pH 6.0 and NaCl added to a final concentration of 150 mM. Purity was assessed by SDS-PAGE (FIG. 18).

[0237] Interferon activity of mouse IFNa2-dAb fusions was assayed using a reporter cell assay consisting of B16 murine hepatoma cells stably transfected with an alkaline phosphatase reporter gene under the control of an interferon inducible element (hereafter referred to as the B16-Blue™ assay, supplied by Invivogen). Mouse IFNa2-dAb fusions were diluted in growth media (RPMI supplemented with 10% (v/v) fetal bovine serum, 50 U/ml penicillin, 50 μg/ml streptomycin, 100 μg/ml Normocin, 100 μg/ml Zeocin and 2 mM L-Glutamine) and 20 μl volumes added to each well of a 96 well microtitre plate. Cells were suspended in growth medium at a concentration of 420,000 cells/ml and 180 μl per well added to the diluted mouse IFNa2-dAb fusions before incubation for 24 hours at 37° C./5% CO₂.Quanti-Blue detection substrate was suspended according to manufacturer's instructions and 180 μl per well added to fresh microtitre plates. 20 μl per well of supernatant from cells incubated with mouse IFNa2-dAb fusions was then added and plates incubated for 1-5 hours before measuring absorbance at 640 nm in an M5e plate reader (Molecular Technologies). Recombinant mouse Interferon-alpha expressed in E coli (PBL Biomedical Laboratories) was used as a standard. Results show that mouse IFNa2-dAb fusions are active in this assay (FIG. 19).

[0238] Binding of mouse IFNa2-dAb fusions to human (His)₆ lectin domain and mouse (His)₆ extracellular domain was tested by BlAcore (method described in example 10). Binding of DOM26h-161-84, DOM26h-196-61 and DOM26h-210-2 to human (His)₆ lectin domain and mouse (His)₆ extracellular domain was retained in the context of an in-line fusion to mouse IFNa2 (an example of mouse IFNa2 fused to DOM26h-196-61 binding to human (His)₆ lectin domain and mouse (His)₆ extracellular domain is shown in FIG. 20).

[0239] Mouse IFNa2-dAb fusions were analysed by size exclusion chromatography with multi-angle LASER light scattering (SEC-MALLS) to determine whether they were monomeric or formed higher order oligomers in solution. SEC-MALLS was carried out as follows. Proteins (at a concentration of 1 mg/mL in 25mM NaAcetate, 150mM NaCl, pH5.5) were separated according to their hydrodynamic properties by size exclusion chromatography (column: TSK3000). Following separation, the propensity of the protein to scatter light is measured using a multi-angle LASER light scattering (MALLS) detector. The intensity of the scattered light while protein passes through the detector is measured as a function of angle. This measurement taken together with the protein concentration determined using the refractive index (RI) detector allows calculation of the molar mass using appropriate equations (integral part of the analysis software Astra v.5.3.4.12).

| | Mean Molar mass over | |
|---|---|---|
| Name | main peak | In-solution state |
| mIFNa2-V_{κ} dummy | 34.1 KDa | Monomer |
| mIFNa2-V_{H} dummy 2 | 35.4 KDa | Monomer |
| mIFNa2-DOM26h-161-84 | 64.3 KDa | Dimer |
| mIFNa2-DOM26h-196-61 | 35.2 KDa | Monomer |
| mIFNa2-DOM26h-210-2 | 35.3 KDa | Monomer |

[0240] Lead dAbs were also analysed by differential scanning calorimetry (DSC) to determine the apparent melting temperature. DSC was carried out as follows. Protein was heated at a constant rate of 180° C./hrs (at lmg/mL in Na Acetate, 150mM NaC1, pH5.5) and a detectable heat change associated with thermal denaturation measured. The transition midpoint (appTm) is determined, which is described as the temperature where 50% of the protein is in its native conformation and the other 50% is denatured. Here, DSC determined the apparent transition midpoint (appTm) as most of the proteins examined do not fully refold. The higher the Tm, the more stable the molecule. The software package used was OriginR v7.0383.

| | App Tm | App Tm |
|---|---|---|
| Name | 1/° C. | 2/° C. |
| mIFNa2-V_{κ} dummy | 64.63 | 75.63 |
| mIFNa2-V_{H} dummy 2 | 60.99 | 76.73 |
| mIFNa2-DOM26h-161-84 | 69.9 | — |
| mIFNa2-DOM26h-196-61 | 62.0 | 71.0 |
| mIFNa2-DOM26h-210-2 | 61.5 | 71.0 |

### Example 13

[0241] Binding of Mouse ASGPR-dAb Fusion Proteins to Murine Liver In Vivo

[0242] Fusion proteins consisting of mouse IFNa2 fused to either V_{H} dummy 2 or DOM26h-196-61 (described in example 12) were labelled with ¹¹¹In as described in examplel 1. NHS:DOTA conjugation protocol was modified slightly by replacing 1xPBS at all steps with 25 mM Na Acetate, 150 mM NaCl, pH5.5. Approximately 12 MBq radiolabelled IFN-dAb fusion was injected into isofluorane anaesthetized balb/c mice intravenously via the tail vein before imaging over a 72 hour time course using the Nanospect/CT preclinical in vivo imaging system. Analysis of images showed that in mice injected with ¹¹¹In labelled mouse IFNa2 fused to either V_{H} dummy 2 or DOM26h-196-61 signal was observed in the kidney, bladder and liver after 3 hours (FIG. 21). However the images collected from mice injected with both types of fusion protein show that the extent of uptake in liver and kidney appears to be equal in mice injected with mouse IFNa2 fused to DOM26h-196-61. Whilst some liver uptake is also observed in mice injected with mouse IFNa2 fused to V_{H} dummy 2 the majority of the signal was observed in the kidney (FIG. 21). These images show that a greater level of liver uptake is observed in mice injected with mouse IFNa2 fused to DOM26h-196-61 compared to mice injected with mouse IFNa2 fused to V_{H} dummy 2, however in order to quantitatively determine the in vivo distribution of ¹¹¹In labelled mouse IFNa2-dAb fusions whole body autoradiography experiments were carried out. Balb/c mice were injected with approximately 0.5 MBq of radiolabelled protein as above. Mice were then sacrificed 3 hours after injection before removing organs and counting in a gamma counter. Counts detected in various organs were expressed as percent injected dose. Results of these experiments show that counts in the liver of mice injected with mouse IFNa2 fused to DOM26h-196-61 were approximately 1.5 times higher compared to counts in the liver of mice injected with mouse IFNa2 fused to VH dummy 2 (FIG. 22). Comparison of the ratio of uptake in liver vs kidney also revealed differences in the two dose groups. In mice injected with mouse IFNa2 fused to V_{H} dummy 2 the ratio was calculated at 1.2, however in the mice injected with mouse IFNa2 fused to DOM26h-196-61 this ratio was increased to 2.6, further evidence of the increased liver uptake of mouse IFNa2 due to fusion to the N-terminus of the ASGPR lectin domain specific dAb DOM26h-196-61 .

The application's sequence listing, which the Patent Office published only in electronic form, follows.

SEQUENCE LISTING (880 sequences)

SEQ ID NO: 1 - DNA, 51 bp, Artificial Sequence
  Synthetic oligonucleotide
ggatccaccggccatcatcatcatcatcaccagaactcccaactccaggaa

SEQ ID NO: 2 - DNA, 33 bp, Artificial Sequence
  Synthetic oligonucleotide
aagcttttattacaggagtggaggctcttgtga

SEQ ID NO: 3 - DNA, 51 bp, Artificial Sequence
  Synthetic oligonucleotide
ggatccaccggccatcatcatcatcatcacagtcaaaattcccaattgcgc

SEQ ID NO: 4 - DNA, 33 bp, Artificial Sequence
  Synthetic oligonucleotide
aagcttttattaattggctttgtccagctttgt

SEQ ID NO: 5 - protein, 20 aa, Artificial Sequence
  Synthetic peptide
METDTLLLWVLLLWVPGSTG

SEQ ID NO: 6 - DNA, 61 bp, Artificial Sequence
  Synthetic oligonucleotide
atggagaccgacaccctgctgctgtgggtgctgctgctgtgggtgcccggatccaccgggc

SEQ ID NO: 7 - protein, 15 aa, Artificial Sequence
  Synthetic peptide
HHHHHHQNSQLQEEL

SEQ ID NO: 8 - protein, 9 aa, Artificial Sequence
  Synthetic peptide
LRGLREFTS

SEQ ID NO: 9 - protein, 15 aa, Artificial Sequence
  Synthetic peptide
  VARIANT 10: Xaa = Any Amino Acid
HHHHHHSQNXQLRED

SEQ ID NO: 10 - protein, 236 aa, Homo Sapiens
HHHHHHQNSQLQEELRGLRETFSNFTASTEAQVKGLSTQGGNVGRKMKSLESQLEKQQKDLSEDHSSLLLHVKQFVSDLRSLSCQMAALQGNGSERTCCPVNWVEHERSCYWFSRSGKAWADADNYCRLEDAHLVVVTSWEEQKFVQHHIGPVNTWMGLHDQNGPWKWVDGTDYETGFKNWRPEQPDDWYGHGLGGGEDCAHFTDDGRWNDDVCQRPYRWVCETELDKASQEPPLL

SEQ ID NO: 11 - DNA, 708 bp, Homo Sapiens
catcatcatcatcatcaccagaactcccaactccaggaagaacttcgaggactgagggagactttctccaatttcaccgcaagcacggaggctcaagtgaagggcctcagcacccagggcgggaatgtgggcaggaaaatgaaatccctggagagccagctcgaaaagcagcagaaagatctgtccgaggaccactctagcctgttgttgcacgtgaaacagtttgtttccgaccttaggagtctttcttgccaaatggccgccctccagggaaacgggtccgagagaacttgctgccccgtcaattgggtggagcacgagcggtcttgttattggtttagccgaagcggaaaagcctgggccgatgcagataactactgccggcttgaggacgcccatctggtcgtggtgaccagttgggaggaacagaaattcgtacagcatcatatcgggcctgttaacacatggatgggccttcatgaccagaatggtccttggaagtgggttgacggaaccgattacgaaaccggattcaagaactggcggcctgaacagccagacgactggtatggacacggcctcggaggcggggaggactgcgcgcatttcacagacgatggccggtggaatgatgatgtgtgccaaaggccttacagatgggtctgcgagacagagctggataaggcttcacaagagcctccactcctg

SEQ ID NO: 12 - protein, 231 aa, Mus musculus
HHHHHHSQNSQLREDLLALRQNFSNLTVSTEDQVKALSTQGSSVGRKMKLVESKLEKQQKDLTEDHSSLLLHVKQLVSDVRSLSCQMAAFRGNGSERTCCPINWVEYEGSCYWFSSSVRPWTEADKYCQLENAHLVVVTSRDEQNFLQRHMGPLNTWIGLTDQNGPWKWVDGTDYETGFQNWRPEQPDNWYGHGLGGGEDCAHFTTDGRWNDDVCRRPYRWVCETKLDKAN

SEQ ID NO: 13 - DNA, 693 bp, Mus musculus
catcatcatcatcatcacagtcaaaattcccaattgcgcgaggatctgctcgcactgcgacagaactttagcaaccttaccgtgtctacggaagaccaggtgaaggcattgtcaactcaggggtcatctgtgggaagaaaaatgaagctcgtggagtcaaagctggagaagcagcaaaaggacctcaccgaagaccattcctctctcctgctgcacgtgaagcagctggtttctgacgtaaggagcctgagctgccagatggctgcttttcgaggtaacggctctgagcgcacatgctgtcctattaattgggtggagtatgagggaagttgttactggttctcaagctccgtgaggccatggaccgaagctgacaaatattgccagctcgaaaatgctcacctcgtggtagtgacctctagggatgagcaaaatttcctgcagcgacacatggggccgcttaatacctggatcgggctgacggaccagaacggaccctggaagtgggttgacggtaccgattatgaaactggattccaaaactggcggccagagcagccggacaactggtatggccacggcctcggagggggcgaggactgtgctcattttacaacggatggccggtggaacgacgatgtgtgcagaaggccatatcggtgggtctgcgagacaaagctggacaaagccaat

SEQ ID NO: 14 - protein, 11 aa, Artificial Sequence
  Synthetic peptide
RASGDIGHALW

SEQ ID NO: 15 - protein, 11 aa, Artificial Sequence
  Synthetic peptide
QASKNIGERLV

SEQ ID NO: 16 - protein, 6 aa, Artificial Sequence
  Synthetic peptide
STYPMH

SEQ ID NO: 17 - protein, 6 aa, Artificial Sequence
  Synthetic peptide
KPYAMH

SEQ ID NO: 18 - protein, 6 aa, Artificial Sequence
  Synthetic peptide
PKYGMA

SEQ ID NO: 19 - protein, 6 aa, Artificial Sequence
  Synthetic peptide
SANGMH

SEQ ID NO: 20 - protein, 6 aa, Artificial Sequence
  Synthetic peptide
ADYSMY

SEQ ID NO: 21 - protein, 11 aa, Artificial Sequence
  Synthetic peptide
RASQAIGRWLL

SEQ ID NO: 22 - protein, 11 aa, Artificial Sequence
  Synthetic peptide
RASMSIDESLW

SEQ ID NO: 23 - protein, 11 aa, Artificial Sequence
  Synthetic peptide
RASHYIGNELW

SEQ ID NO: 24 - protein, 11 aa, Artificial Sequence
  Synthetic peptide
RASSNIGRSLV

SEQ ID NO: 25 - protein, 11 aa, Artificial Sequence
  Synthetic peptide
RASSYIGGELW

SEQ ID NO: 26 - protein, 11 aa, Artificial Sequence
  Synthetic peptide
RASVKIGERLW

SEQ ID NO: 27 - protein, 11 aa, Artificial Sequence
  Synthetic peptide
RASSWINSDLV

SEQ ID NO: 28 - protein, 8 aa, Artificial Sequence
  Synthetic peptide
RGGSALQS

SEQ ID NO: 29 - protein, 8 aa, Artificial Sequence
  Synthetic peptide
GFASLLQS

SEQ ID NO: 30 - protein, 8 aa, Artificial Sequence
  Synthetic peptide
SISPSGDS

SEQ ID NO: 31 - protein, 8 aa, Artificial Sequence
  Synthetic peptide
SISSTGLS

SEQ ID NO: 32 - protein, 8 aa, Artificial Sequence
  Synthetic peptide
RIGATGSE

SEQ ID NO: 33 - protein, 8 aa, Artificial Sequence
  Synthetic peptide
VISATGDQ

SEQ ID NO: 34 - protein, 8 aa, Artificial Sequence
  Synthetic peptide
DISPSGSM

SEQ ID NO: 35 - protein, 8 aa, Artificial Sequence
  Synthetic peptide
YAASRLQS

SEQ ID NO: 36 - protein, 8 aa, Artificial Sequence
  Synthetic peptide
RGGSGLQS

SEQ ID NO: 37 - protein, 8 aa, Artificial Sequence
  Synthetic peptide
RRGSGLQS

SEQ ID NO: 38 - protein, 8 aa, Artificial Sequence
  Synthetic peptide
AGGSLLQS

SEQ ID NO: 39 - protein, 8 aa, Artificial Sequence
  Synthetic peptide
SGTSGLQS

SEQ ID NO: 40 - protein, 8 aa, Artificial Sequence
  Synthetic Peptide
RDASLLQS

SEQ ID NO: 41 - protein, 8 aa, Artificial Sequence
  Synthetic peptide
AGGSLLQS

SEQ ID NO: 42 - protein, 9 aa, Artificial Sequence
  Synthetic peptide
GQSHVRPFT

SEQ ID NO: 43 - protein, 9 aa, Artificial Sequence
  Synthetic peptide
GQSHVRPFT

SEQ ID NO: 44 - protein, 7 aa, Artificial Sequence
  Synthetic peptide
NALRFDY

SEQ ID NO: 45 - protein, 11 aa, Artificial Sequence
  Synthetic peptide
DASRFRQPFDY

SEQ ID NO: 46 - protein, 12 aa, Artificial Sequence
  Synthetic peptide
HRGTAHSSFFDY

SEQ ID NO: 47 - protein, 11 aa, Artificial Sequence
  Synthetic peptide
GYDRRHRKFDY

SEQ ID NO: 48 - protein, 13 aa, Artificial Sequence
  Synthetic peptide
GLPGQNMHVGFDY

SEQ ID NO: 49 - protein, 9 aa, Artificial Sequence
  Synthetic peptide
QQAYSLPPT

SEQ ID NO: 50 - protein, 9 aa, Artificial Sequence
  Synthetic peptide
GQAARRPYT

SEQ ID NO: 51 - protein, 9 aa, Artificial Sequence
  Synthetic peptide
GQARHRPYT

SEQ ID NO: 52 - protein, 9 aa, Artificial Sequence
  Synthetic peptide
GQYAEEPFT

SEQ ID NO: 53 - protein, 9 aa, Artificial Sequence
  Synthetic peptide
GQAAKRPFT

SEQ ID NO: 54 - protein, 9 aa, Artificial Sequence
  Synthetic peptide
GQSWMRPYT

SEQ ID NO: 55 - protein, 9 aa, Artificial Sequence
  Synthetic peptide
GQYLEEPYT

SEQ ID NO: 56 - protein, 6 aa, Artificial Sequence
  Synthetic peptide
DDYEMG

SEQ ID NO: 57 - protein, 11 aa, Artificial Sequence
  Synthetic peptide
RASKYIGSDLY

SEQ ID NO: 58 - protein, 6 aa, Artificial Sequence
  Synthetic peptide
EDSGMI

SEQ ID NO: 59 - protein, 6 aa, Artificial Sequence
  Synthetic peptide
AKYDMI

SEQ ID NO: 60 - protein, 11 aa, Artificial Sequence
  Synthetic peptide
RASISIYEHLN

SEQ ID NO: 61 - protein, 6 aa, Artificial Sequence
  Synthetic peptide
REHPMS

SEQ ID NO: 62 - protein, 11 aa, Artificial Sequence
  Synthetic peptide
RASLNIDTDLV

SEQ ID NO: 63 - protein, 11 aa, Artificial Sequence
  Synthetic peptide
RASQPIRNALT

SEQ ID NO: 64 - protein, 8 aa, Artificial Sequence
  Synthetic peptide
LISAQGRV

SEQ ID NO: 65 - protein, 8 aa, Artificial Sequence
  Synthetic peptide
GGGSRLQS

SEQ ID NO: 66 - protein, 8 aa, Artificial Sequence
  Synthetic peptide
GIASEGST

SEQ ID NO: 67 - protein, 8 aa, Artificial Sequence
  Synthetic peptide
GINHSGSR

SEQ ID NO: 68 - protein, 8 aa, Artificial Sequence
  Synthetic peptide
SISKHGSE

SEQ ID NO: 69 - protein, 8 aa, Artificial Sequence
  Synthetic peptide
SISKHGSE

SEQ ID NO: 70 - protein, 8 aa, Artificial Sequence
  Synthetic peptide
AGWSGLQS

SEQ ID NO: 71 - protein, 8 aa, Artificial Sequence
  Synthetic peptide
YRTSHLQS

SEQ ID NO: 72 - protein, 11 aa, Artificial Sequence
  Synthetic peptide
NSPSYLLNFDY

SEQ ID NO: 73 - protein, 9 aa, Artificial Sequence
  Synthetic peptide
GQKWARPLT

SEQ ID NO: 74 - protein, 7 aa, Artificial Sequence
  Synthetic peptide
SGLSFDY

SEQ ID NO: 75 - protein, 7 aa, Artificial Sequence
  Synthetic peptide
SGSSFDY

SEQ ID NO: 76 - protein, 9 aa, Artificial Sequence
  Synthetic peptide
VQHHSHPPT

SEQ ID NO: 77 - protein, 7 aa, Artificial Sequence
  Synthetic peptide
SVREFDY

SEQ ID NO: 78 - protein, 9 aa, Artificial Sequence
  Synthetic peptide
GQFAREPFT

SEQ ID NO: 79 - protein, 9 aa, Artificial Sequence
  Synthetic peptide
QQTWTMPLT

SEQ ID NO: 80 - DNA, 24 bp, Artificial Sequence
  Synthetic oligonucleotide
agcggataacaatttcacacagga

SEQ ID NO: 81 - DNA, 49 bp, Artificial Sequence
  Synthetic oligonucleotide
ctagcgttggctttgcggccgcggatccttattagcacgagacggtgac

SEQ ID NO: 82 - DNA, 24 bp, Artificial Sequence
  Synthetic oligonucleotide
agcggataacaatttcacacagga

SEQ ID NO: 83 - DNA, 32 bp, Artificial Sequence
  Synthetic oligonucleotide
ggatccaccggctgcgatctgcctcacactta

SEQ ID NO: 84 - DNA, 39 bp, Artificial Sequence
  Synthetic oligonucleotide
cctaggagcggcgacggtctccttctcttcactcagtct

SEQ ID NO: 85 - DNA, 31 bp, Artificial Sequence
  Synthetic oligonucleotide
gctagcgacatccagatgacccagtctccat

SEQ ID NO: 86 - DNA, 30 bp, Artificial Sequence
  Synthetic oligonucleotide
gctagcgaggtgcagctgttggagtctggg

SEQ ID NO: 87 - DNA, 36 bp, Artificial Sequence
  Synthetic oligonucleotide
aagcttttattaccgtttgatttccaccttggtccc

SEQ ID NO: 88 - DNA, 37 bp, Artificial Sequence
  Synthetic oligonucleotide
aagcttttattagctcgagacggtgaccagggttccc

SEQ ID NO: 89 - DNA, 36 bp, Artificial Sequence
  Synthetic oligonucleotide
aagcttttattagcatttgatttccaccttggtccc

SEQ ID NO: 90 - DNA, 36 bp, Artificial Sequence
  Synthetic oligonucleotide
aagcttttattagcacgagacggtgaccagggttcc

SEQ ID NO: 91 - protein, 6 aa, Artificial Sequence
  Synthetic peptide
TVAAPS

SEQ ID NO: 92 - DNA, 18 bp, Artificial Sequence
  Synthetic oligonucleotide
accgtcgccgctcctagc

SEQ ID NO: 93 - protein, 668 aa, Mus musculus
CDLPHTYNLRNKRALKVLAQMRRLPFLSCLKDRQDFGFPLEKVDNQQIQKAQAIPVLRDLTQQTLNLFTSKASSAAWNTTLLDSFCNDLHQQLNDLQTCLMQQVGVQEPPLTQEDALLAVRKYFHRITVYLREKKHSPCAWEVVRAEVWRALSSSVNLLPRLSEEKETGCGATCTGCCTCACACTTATAACCTCAGGAACAAGAGGGCCTTGAAGGTCCTGGCACAGATGAGGAGGCTCCCCTTTCTCTCCTGCCTGAAGGACAGGCAGGACTTTGGATTCCCCCTGGAGAAGGTGGATAACCAGCAGATCCAGAAGGCTCAAGCCATCCCTGTGCTGCGAGATCTTACTCAGCAGACCTTGAACCTCTTCACATCAAAGGCTTCATCTGCTGCTTGGAATACAACCCTCCTAGACTCATTCTGCAATGACCTCCACCAGCAGCTCAATGACCTGCAAACCTGTCTGATGCAGCAGGTGGGGGTGCAGGAACCTCCTCTGACCCAGGAAGACGCCCTGCTGGCTGTGAGGAAATATTTCCACAGGATCACTGTGTACCTGAGAGAGAAGAAACACAGCCCCTGTGCCTGGGAGGTGGTCAGAGCAGAAGTCTGGAGAGCCCTGTCTTCCTCAGTCAACTTGCTGCCAAGACTGAGTGAAGAGAAGGAG

SEQ ID NO: 94 - DNA, 21 bp, Artificial Sequence
  Synthetic oligonucleotide
caggaaacagctatgaccatg

SEQ ID NO: 95 - DNA, 20 bp, Artificial Sequence
  Synthetic oligonucleotide
ttcgctattacgccagctgg

SEQ ID NO: 96 - DNA, 501 bp, Mus musculus
tgcgatctgcctcacacttataacctcaggaacaagagggccttgaaggtcctggcacagatgaggaggctcccctttctctcctgcctgaaggacaggcaggactttggattccccctggagaaggtggataaccagcagatccagaaggctcaagccatccctgtgctgcgagatcttactcagcagaccttgaacctcttcacatcaaaggcttcatctgctgcttggaatacaaccctcctagactcattctgcaatgacctccaccagcagctcaatgacctgcaaacctgtctgatgcagcaggtgggggtgcaggaacctcctctgacccaggaagacgccctgctggctgtgaggaaatatttccacaggatcactgtgtacctgagagagaagaaacacagcccctgtgcctgggaggtggtcagagcagaagtctggagagccctgtcttcctcagtcaacttgctgccaagactgagtgaagagaaggag

SEQ ID NO: 97 - DNA, 20 bp, Artificial Sequence
  Synthetic oligonucleotide
aaagggggatgtgctgcaag

SEQ ID NO: 98 - DNA, 21 bp, Artificial Sequence
  Synthetic oligonucleotide
aaggcgattaagttgggtaac

SEQ ID NO: 99 - DNA, 19 bp, Artificial Sequence
  Synthetic oligonucleotide
ccagggttttcccagtcac

SEQ ID NO: 100 - DNA, 19 bp, Artificial Sequence
  Synthetic oligonucleotide
gagatggcgcccaacagtc

SEQ ID NO: 101 - DNA, 19 bp, Artificial Sequence
  Synthetic oligonucleotide
ctgccaccatacccacgcc

SEQ ID NO: 102 - DNA, 19 bp, Artificial Sequence
  Synthetic oligonucleotide
cagtcaggcaccgtgtatg

SEQ ID NO: 103 - DNA, 21 bp, Artificial Sequence
  Synthetic oligonucleotide
aacaatgcgctcatcgtcatc

SEQ ID NO: 104 - DNA, 18 bp, Artificial Sequence
  Synthetic oligonucleotide
tcggcaccgtcaccctgg

SEQ ID NO: 105 - DNA, 20 bp, Artificial Sequence
  Synthetic oligonucleotide
tgctgtaggcataggcttgg

SEQ ID NO: 106 - DNA, 19 bp, Artificial Sequence
  Synthetic oligonucleotide
cctcttgcgggatatcgtc

SEQ ID NO: 107 - DNA, 19 bp, Artificial Sequence
  Synthetic oligonucleotide
tccattccgacagcatcgc

SEQ ID NO: 108 - DNA, 20 bp, Artificial Sequence
  Synthetic oligonucleotide
gaaacaagcgctcatgagcc

SEQ ID NO: 109 - DNA, 20 bp, Artificial Sequence
  Synthetic oligonucleotide
ttgtaaaacgacggccagtg

SEQ ID NO: 110 - DNA, 19 bp, Artificial Sequence
  Synthetic oligonucleotide
ggcgtagaggatcgagatc

SEQ ID NO: 111 - DNA, 20 bp, Artificial Sequence
  Synthetic oligonucleotide
ttgttaccggatctctcgag

SEQ ID NO: 112 - DNA, 18 bp, Artificial Sequence
  Synthetic oligonucleotide
ccagcaaccgcacctgtg

SEQ ID NO: 113 - DNA, 19 bp, Artificial Sequence
  Synthetic oligonucleotide
agtggcgagcccgatcttc

SEQ ID NO: 114 - DNA, 20 bp, Artificial Sequence
  Synthetic oligonucleotide
cgatataggcgccagcaacc

SEQ ID NO: 115 - DNA, 20 bp, Artificial Sequence
  Synthetic oligonucleotide
cagtcactatggcgtgctgc

SEQ ID NO: 116 - DNA, 21 bp, Artificial Sequence
  Synthetic oligonucleotide
tagcgctatatgcgttgatgc

SEQ ID NO: 117 - DNA, 20 bp, Artificial Sequence
  Synthetic oligonucleotide
ttctatgcgcacccgttctc

SEQ ID NO: 118 - DNA, 20 bp, Artificial Sequence
  Synthetic oligonucleotide
agcactgtccgaccgctttg

SEQ ID NO: 119 - DNA, 20 bp, Artificial Sequence
  Synthetic oligonucleotide
ttcaggctgcgcaactgttg

SEQ ID NO: 120 - DNA, 22 bp, Artificial Sequence
  Synthetic oligonucleotide
cgccaagcttgcatgcaaattc

SEQ ID NO: 121 - DNA, 79 bp, Artificial Sequence
  Synthetic oligonucleotide
ggctttacctggtttctgctggtaccaatamaamtcmctmccmatatamttmctmgcmcggcaagtgatggtgacacgg

SEQ ID NO: 122 - DNA, 80 bp, Artificial Sequence
  Synthetic oligonucleotide
tattggtaccagcagaaaccaggtaaagcccctaagctcctgatkggkggkggktckcgkttkcakagtggggtctcatc

SEQ ID NO: 123 - DNA, 91 bp, Artificial Sequence
  Synthetic oligonucleotide
tgtgtgtggcggccgcccgtttgatttccaccttggtcccttggccgaacgtmagmggmctmgcmcamttmtgmccmcagtagtacgtagc

SEQ ID NO: 124 - DNA, 79 bp, Artificial Sequence
  Synthetic oligonucleotide
ggctttccctggtttctgctggtaccaattmaamtgmtcatamatmctmatmctmgcmcggcaagtgatggtgacacgg

SEQ ID NO: 125 - DNA, 80 bp, Artificial Sequence
  Synthetic oligonucleotide
aattggtaccagcagaaaccagggaaagcccctacgctcctgatktgkgaktcktckggkttkcakagtggggtcccatc

SEQ ID NO: 126 - DNA, 91 bp, Artificial Sequence
  Synthetic oligonucleotide
tgtgtgtggcggccgcccgtttgatttccaccttggtcccttggccgaacgtmggmggmtgmctmtgmtgmtgmacmcagtagtacgtagc

SEQ ID NO: 127 - DNA, 76 bp, Artificial Sequence
  Synthetic oligonucleotide
tgagacccactccagacccttccctggagcctggcgggcccamatmatmccmctmtcmtcaaaggtgaatccggag

SEQ ID NO: 128 - DNA, 76 bp, Artificial Sequence
  Synthetic oligonucleotide
tgagacccactctagacccttccctggagcctggcggacccamatmatmtcatamttmgcaaaggtgaatccggag

SEQ ID NO: 129 - DNA, 76 bp, Artificial Sequence
  Synthetic oligonucleotide
tgagacccactctagacccttccctggagcctggcggacccamctmatmggmtgmtcmctaaaggtgaatccggag

SEQ ID NO: 130 - DNA, 92 bp, Artificial Sequence
  Synthetic oligonucleotide
ctccagggaagggtctggagtgggtctcaggkatkgcktckgakggkagkackacktactacgckgaktckgtkaakggkcggttcaccatc

SEQ ID NO: 131 - DNA, 92 bp, Artificial Sequence
  Synthetic oligonucleotide
ctccagggaagggtctagagtgggtctcaggkatkaakcaktckggktckcgkacktactacgckgaktckgtkaakggkcggttcaccatc

SEQ ID NO: 132 - DNA, 85 bp, Artificial Sequence
  Synthetic oligonucleotide
tgtgtgtggcggccgcgctcgagacggtgaccagggttccctgaccccagtamtcmaamgamagmccmgatttcgcacagtaata

SEQ ID NO: 133 - DNA, 85 bp, Artificial Sequence
  Synthetic oligonucleotide
tgtgtgtggcggccgcgctcgagacggtgaccagggttccctgaccccagtamtcmaamgamgamccmgatttcgcacagtaata

SEQ ID NO: 134 - DNA, 85 bp, Artificial Sequence
  Synthetic oligonucleotide
tgtgtgtggcggccgcgctcgagacggtgaccagggttccctgaccccagtamtcmaamtcmcgmacmgatttcacacagtaata

SEQ ID NO: 135 - DNA, 42 bp, Artificial Sequence
  Synthetic oligonucleotide
tgagacccactctagacccttccctggagcctggcggaccca

SEQ ID NO: 136 - DNA, 42 bp, Artificial Sequence
  Synthetic oligonucleotide
tgggtccgccaggctccagggaagggtctagagtgggtctca

SEQ ID NO: 137 - DNA, 90 bp, Artificial Sequence
  Synthetic oligonucleotide
gaagggtctagagtgggtctcatckattagktckackggkctkagkacktactacgckgaktckgtgaakggkcggttcaccatctcccg

SEQ ID NO: 138 - DNA, 74 bp, Artificial Sequence
  Synthetic oligonucleotide
cggtatattactgtgcgaaagakgcktckcgkttkagkcakcckttkgaktactggggtcagggaaccctggtc

SEQ ID NO: 139 - DNA, 21 bp, Artificial Sequence
  Synthetic oligonucleotide
tttcgcacagtaatataccgc

SEQ ID NO: 140 - DNA, 36 bp, Artificial Sequence
  Synthetic oligonucleotide
aaaggtgaatccggaggctgcacaggagagacgcag

SEQ ID NO: 141 - DNA, 56 bp, Artificial Sequence
  Synthetic oligonucleotide
gcctccggattcacctttgckgaktattckatgtattgggtccgccaggctccagg

SEQ ID NO: 142 - DNA, 99 bp, Artificial Sequence
  Synthetic oligonucleotide
gaagggtctagagtgggtctcagakatkagkccktckggkagkatkacktactacgckgaktckgtkaakggkcggttcaccatctcccgtgacaattc

SEQ ID NO: 143 - DNA, 80 bp, Artificial Sequence
  Synthetic oligonucleotide
cggtatattactgtgcgaaaggkctkcckggkcakaakatkcakgtkggkttkgaktactggggtcagggaaccctggtc

SEQ ID NO: 144 - DNA, 53 bp, Artificial Sequence
  Synthetic oligonucleotide
  misc_feature 27, 28, 30, 31, 33, 34: n = A,T,C or G
gggtctcatcgattagtaagcatggtnnknnknnktactacgcagactccgtg

SEQ ID NO: 145 - DNA, 47 bp, Artificial Sequence
  Synthetic oligonucleotide
  misc_feature 21, 22, 24, 25, 27, 28: n = A,T,C or G
gggtctcatcgattagtaagnnknnknnkgtgacatactacgcagac

SEQ ID NO: 146 - DNA, 20 bp, Artificial Sequence
  Synthetic oligonucleotide
cttactaatcgatgagaccc

SEQ ID NO: 147 - DNA, 36 bp, Artificial Sequence
  Synthetic oligonucleotide
ccgagagaacttgctaataatgccccgtcaattggg

SEQ ID NO: 148 - DNA, 36 bp, Artificial Sequence
  Synthetic oligonucleotide
cccaattgacggggcattattagcaagttctctcgg

SEQ ID NO: 149 - DNA, 58 bp, Artificial Sequence
  Synthetic oligonucleotide
gcccggatccaccggccatcatcatcatcatcacgggtcgtgccccgtcaattgggtg

SEQ ID NO: 150 - DNA, 68 bp, Artificial Sequence
  Synthetic oligonucleotide
gggtgcccggatccaccggccatcatcatcatcatcacgggtcgcacgagcggtcttgttattggagc

SEQ ID NO: 151 - protein, 98 aa, Homo sapiens
HHHHHHQNSQLQEELRGLRETFSNFTASTEAQVKGLSTQGGNVGRKMKSLESQLEKQQKDLSEDHSSLLLHVKQFVSDLRSLSCQMAALQGNGSERTC

SEQ ID NO: 152 - DNA, 294 bp, Homo sapiens
catcatcatcatcatcaccagaactcccaactccaggaagaacttcgaggactgagggagactttctccaatttcaccgcaagcacggaggctcaagtgaagggcctcagcacccagggcgggaatgtgggcaggaaaatgaaatccctggagagccagctcgaaaagcagcagaaagatctgtccgaggaccactctagcctgttgttgcacgtgaaacagtttgtttccgaccttaggagtctttcttgccaaatggccgccctccagggaaacgggtccgagagaacttgc

SEQ ID NO: 153 - protein, 146 aa, Homo sapiens
HHHHHHGSCPVNWVEHERSCYWFSRSGKAWADADNYCRLEDAHLVVVTSWEEQKFVQHHIGPVNTWMGLHDQNGPWKWVDGTDYETGFKNWRPEQPDDWYGHGLGGGEDCAHFTDDGRWNDDVCQRPYRWVCETELDKASQEPPLL

SEQ ID NO: 154 - DNA, 438 bp, Homo sapiens
catcatcatcatcatcacgggtcgtgccccgtcaattgggtggagcacgagcggtcttgttattggtttagccgaagcggaaaagcctgggccgatgcagataactactgccggcttgaggacgcccatctggtcgtggtgaccagttgggaggaacagaaattcgtacagcatcatatcgggcctgttaacacatggatgggccttcatgaccagaatggtccttggaagtgggttgacggaaccgattacgaaaccggattcaagaactggcggcctgaacagccagacgactggtatggacacggcctcggaggcggggaggactgcgcgcatttcacagacgatggccggtggaatgatgatgtgtgccaaaggccttacagatgggtctgcgagacagagctggataaggcttcacaagagcctccactcctg

SEQ ID NO: 155 - DNA, 372 bp, Artificial Sequence
  Synthetic oligonucleotide
gaggtgcagctgttggagtctgggggaggcttggtacagcctggggggtccctgcgtctctcctgtgcagcctccggattcacctttcctgattatctgatgagttgggtccgccaggctccagggaagggtctagagtgggtctcatctattaagccttcgggtacgattacatactacgcagactccgtgaagggccggttcaccatctcccgcgacaattccaagaacacgctgtatctgcaaatgaacagcctgcgtgccgaggacaccgcggtatattactgtgcgaaagtgaagagtggttatcctagggtgtttacggatgcgtttgactactggggtcagggaaccctggtcaccgtctcgagc

SEQ ID NO: 156 - protein, 124 aa, Artificial Sequence
  Synthetic peptide
EVQLLESGGGLVQPGGSLRLSCAASGFTFPDYLMSWVRQAPGKGLEWVSSIKPSGTITYYADSVKGRFTISRDNSKNTLYLQMNSLRAEDTAVYYCAKVKSGYPRVFTDAFDYWGQGTLVTVSS

SEQ ID NO: 157 - DNA, 360 bp, Artificial Sequence
  Synthetic oligonucleotide
gaggtgcagctgctggagtctgggggaggcttggtacagcctggggggtccctgcgtctctcctgtgcagcctccggattcacctttgctaattatgatatggtttgggtccgccaggctccagggaagggtctggagtgggtctcagctattgggcggtctggtcagtctacatactacgcagactccgtgaagggccggttcaccatctcccgcgacaattccaagaacacgctgtatctgcaaatgaacagcctgcgtgccgaggacaccgcggtatattactgtgcgaaattgtttccgaggggtcagcgtaagtttgactactggggtcagggaaccctggtcaccgtctcgagc

SEQ ID NO: 158 - protein, 120 aa, Artificial Sequence
  Synthetic peptide
EVQLLESGGGLVQPGGSLRLSCAASGFTFANYDMVWVRQAPGKGLEWVSAIGRSGQSTYYADSVKGRFTISRDNSKNTLYLQMNSLRAEDTAVYYCAKLFPRGQRKFDYWGQGTLVTVSS

SEQ ID NO: 159 - DNA, 357 bp, Artificial Sequence
  Synthetic oligonucleotide
gaggtgcagctgttggagtctgggggaggcttggtacagcctggggggtccctgcgtctctcctgtgcagcctccggattcacctttgatcatgagtctatggcttgggtccgccaggctccagggaagggtctagagtgggtctcatcgattaattcgaggggtaattttacatactacgcagactccgtgaagggccggttcaccatctcccgcgacaattccaagaacacgctgtatctgcaaatgaacagcctgcgtgccgaggacaccgcggtatattactgtgcgaaatatccgtatgcgaatcgttcgtttgactactggggtcagggaaccctggtcaccgtctcgagc

SEQ ID NO: 160 - protein, 119 aa, Artificial Sequence
  Synthetic peptide
EVQLLESGGGLVQPGGSLRLSCAASGFTFDHESMAWVRQAPGKGLEWVSSINSRGNFTYYADSVKGRFTISRDNSKNTLYLQMNSLRAEDTAVYYCAKYPYANRSFDYWGQGTLVTVSS

SEQ ID NO: 161 - DNA, 357 bp, Artificial Sequence
  Synthetic oligonucleotide
gaggtgcagctgttggagtctgggggaggcttggtacagcctggggggtccctgcgtctctcctgtgcagcctccggattcaccttttcgacgactcctatgatgtgggtccgccaggctccagggaagggtctagagtgggtctcatcgattcctgctgatggtacggatacatactacgcagactccgtgaagggccggttcaccatctcccgcgacaattccaagaacacgctgtatctgcaaatgaacagcctgcgtgccgaggacaccgcggtatattactgtgcgaaatataggaggatgactcggaagtttgactaccggggtcagggaaccctggtcaccgtctcgagc

SEQ ID NO: 162 - protein, 119 aa, Artificial Sequence
  Synthetic peptide
EVQLLESGGGLVQPGGSLRLSCAASGFTFSTTPMMWVRQAPGKGLEWVSSIPADGTDTYYADSVKGRFTISRDNSKNTLYLQMNSLRAEDTAVYYCAKYRRMTRKFDYRGQGTLVTVSS

SEQ ID NO: 163 - DNA, 357 bp, Artificial Sequence
  Synthetic oligonucleotide
gaggtgcagctgttggagtctgggggaggcttggtacagcctggggggtccctgcgtctctcctgtgcagcctccggattcacctttggggatggtaatatgggttgggcccgccaggctccagggaagggtctagagtgggtctcagctattactgagcctggtctgaatacatactacgcagactccgtgaagggccggttcaccatctcccgcgacaattccaagaacacgctgtatctgcaaatgaacagcctgcgtgccgaggacaccgcggtatattactgtgcgaaagttagtgatatgagtggttcttttgactactggggtcagggaaccctggtcaccgtctcgagc

SEQ ID NO: 164 - protein, 119 aa, Artificial Sequence
  Synthetic peptide
EVQLLESGGGLVQPGGSLRLSCAASGFTFGDGNMGWARQAPGKGLEWVSAITEPGLNTYYADSVKGRFTISRDNSKNTLYLQMNSLRAEDTAVYYCAKVSDMSGSFDYWGQGTLVTVSS

SEQ ID NO: 165 - DNA, 360 bp, Artificial Sequence
  Synthetic oligonucleotide
gaggtgcagctgttggagtctgggggaggcttggtacagcctggggggtccctgcgtctctcctgcgcagcctccggattcacctttcgtaattatccgatgatgtgggtccgccaggctccagggaagggtctagagtgggtctcagatatttctcaggagggtaatcttacatactacgcagactccgtgaagggccggttcaccatctcccgagacaattccaagaacacgctgtatctgcaaatgaacagcctgcgtgccgaggacaccgcggtatattactgtgcgaaaggtttgcattatgattcgcgttcttttgactactggggtcagggaaccctggtcaccgtctcgagc

SEQ ID NO: 166 - protein, 120 aa, Artificial Sequence
  Synthetic peptide
EVQLLESGGGLVQPGGSLRLSCAASGFTFRNYPMMWVRQAPGKGLEWVSDISQEGNLTYYADSVKGRFTISRDNSKNTLYLQMNSLRAEDTAVYYCAKGLHYDSRSFDYWGQGTLVTVSS

SEQ ID NO: 167 - DNA, 363 bp, Artificial Sequence
  Synthetic oligonucleotide
gaggtgcagctgttggagtctgggggaggcttggtacagcctggggggtccctgcgtctctcctgtgcagcctccggattcacctttccgaagtatgggatggcgtgggtccgccaggctccagggaagggtctagagtgggtctcacggattggggctactggttctgagacatactacgcagactccgtgaagggccggttcaccatctcccgcgacaattccaagaacacgctgtatctgcaaatgaacagcctgcgtgccgaggacaccgcggtatattactgtgcgaaacatagggggacggctcatagttctttttttgactactggggtcagggaaccctggtcaccgtctcgagc

SEQ ID NO: 168 - protein, 121 aa, Artificial Sequence
  Synthetic peptide
EVQLLESGGGLVQPGGSLRLSCAASGFTFPKYGMAWVRQAPGKGLEWVSRIGATGSETYYADSVKGRFTISRDNSKNTLYLQMNSLRAEDTAVYYCAKHRGTAHSSFFDYWGQGTLVTVSS

SEQ ID NO: 169 - DNA, 357 bp, Artificial Sequence
  Synthetic oligonucleotide
gaggtgcagctgttggagtctgggggaggcttggtacagcctggggggtccctgcgtctctcctgtgcagcctccggattcacctttggggcgccgggtatggggtgggtccgccaggctccagggaagggtctagagtgggtctcatttattgggcctacgggtcagggtacatactacgcagactccgtgaagggccggttcaccatctcccgcgacaattccaagaacacgctgtatctgcaaatgaacagcctgcgtgccgaggataccgcggtatattactgtgcgaaaattaatccgcatactaataagtttgactactggggtcagggaaccctggtcaccgtctcgagc

SEQ ID NO: 170 - protein, 119 aa, Artificial Sequence
  Synthetic peptide
EVQLLESGGGLVQPGGSLRLSCAASGFTFGAPGMGWVRQAPGKGLEWVSFIGPTGQGTYYADSVKGRFTISRDNSKNTLYLQMNSLRAEDTAVYYCAKINPHTNKFDYWGQGTLVTVSS

SEQ ID NO: 171 - DNA, 360 bp, Artificial Sequence
  Synthetic oligonucleotide
gaggtgcagctgttggagtctgggggaggcttggtacagcctggggggtccctgcgtctctcctgtgcagcctccggattcacctttagttcgtatcctatggcttgggtccgccaggctccagggaagggtctggagtgggtctcacgtattgatcggaatggtcgggagacatactacgcagactccgtgaagggccggttcaccatctcccgcgacaattccaagaacacgctgtatctgcaaatgaacagcctgcgtgccgaggacaccgcggtatattactgtgcgaaacatatttattctattcatacgaagtttgactactggggtctgggaaccctggtcaccgtctcgagc

SEQ ID NO: 172 - protein, 120 aa, Artificial Sequence
  Synthetic pepetide
EVQLLESGGGLVQPGGSLRLSCAASGFTFSSYPMAWVRQAPGKGLEWVSRIDRNGRETYYADSVKGRFTISRDNSKNTLYLQMNSLRAEDTAVYYCAKHIYSIHTKFDYWGLGTLVTVSS

SEQ ID NO: 173 - DNA, 348 bp, Artificial Sequence
  Synthetic oligonucleotide
gaggtgcagctgttggagtctgggggaggcttggtacagcctggggggtccctgcgtctctcctgtgcagcctccggattcacgtttgggacgtatcatatgtcgtgggtccgccaggctccagggaagggtctagagtgggtctcctctatttcgtcggatggtaatgttacatactatgcagactccgtgaagggccggttcaccatctcccgcgacaattccaagaacacgctgtatctgcaaatgaacagcctgcgtgccgaggacaccgcggtatattactgtgcgaaagatattgagtcgtttgactactggggtcagggaaccctggtcaccgtctcgagc

SEQ ID NO: 174 - protein, 116 aa, Artificial Sequence
  Synthetic peptide
EVQLLESGGGLVQPGGSLRLSCAASGFTFGTYHMSWVRQAPGKGLEWVSSISSDGNVTYYADSVKGRFTISRDNSKNTLYLQMNSLRAEDTAVYYCAKDIESFDYWGQGTLVTVSS

SEQ ID NO: 175 - DNA, 363 bp, Artificial Sequence
  Synthetic oligonucleotide
gaggtgcagctgttggagtctgggggaggcttggtacagcctggggggtccctgcgtctctcctgtgcagcctccggattcacctttgatgcttatacgatggggtgggtccgccaggctccagggaagggtctagagtgggtctcagatattagttctaatggttcttctacctactacgcagactccgtgaagggccggttcaccatctcccgcgacaattccaagaacacgctgtatctgcaaatgaacagcctgcgtgccgaggacaccgcggtatattactgtgcgaaatttccgttgcttacgccggagttggtttttgactactggggtcagggaaccctggtcaccgtctcgagc

SEQ ID NO: 176 - protein, 121 aa, Artificial Sequence
  Synthetic peptide
EVQLLESGGGLVQPGGSLRLSCAASGFTFDAYTMGWVRQAPGKGLEWVSDISSNGSSTYYADSVKGRFTISRDNSKNTLYLQMNSLRAEDTAVYYCAKFPLLTPELVFDYWGQGTLVTVSS

SEQ ID NO: 177 - DNA, 360 bp, Artificial Sequence
  Synthetic oligonucleotide
gaggtgcagctgttggagtctgggggaggcttggtacagcctggggggtccctgcgtctctcctgtgcagcctccggattcacctttgataattatgggatgatgtgggtccgccaggctccagggaagggtctagagtgggtctcagatattacgcaggatggtcgggatacatactacgcagactccgtgaagggccggttcaccatctcccgcgacaattccaagaacatgctgtatctgcaaatgaacagcctgcgtgccgaggataccgcggtatattactgtgcgaaaatgtctgctgggtttgctccttcgtttgactactggggtcagggaaccctggtcaccgtctcgagc

SEQ ID NO: 178 - protein, 120 aa, Artificial Sequence
  Synthetic peptide
EVQLLESGGGLVQPGGSLRLSCAASGFTFDNYGMMWVRQAPGKGLEWVSDITQDGRDTYYADSVKGRFTISRDNSKNMLYLQMNSLRAEDTAVYYCAKMSAGFAPSFDYWGQGTLVTVSS

SEQ ID NO: 179 - DNA, 360 bp, Artificial Sequence
  Synthetic oligonucleotide
gaggtgcagctgttggagtctgggggaggcttggtacagcctggggggtccctgcgtctctcctgtgcagcctccggattcacctttgataattatacgatgcattgggcccgccaggctccagggaagggtctagagtgggtctcaagtatttcgggtgtgggtgagacgacatactacgcagactccgtgaagggccggttcaccatctcccgcgacaattccaagaacacgctgtatctgcaaatgaacagcctgcgtgccgaggacaccgcggtttattactgtgcggaacatagggttgatggtcataagtcttttgactactggggtcagggaaccctggtcaccgtctcgagc

SEQ ID NO: 180 - protein, 120 aa, Artificial Sequence
  Synthetic peptide
EVQLLESGGGLVQPGGSLRLSCAASGFTFDNYTMHWARQAPGKGLEWVSSISGVGETTYYADSVKGRFTISRDNSKNTLYLQMNSLRAEDTAVYYCAEHRVDGHKSFDYWGQGTLVTVSS

SEQ ID NO: 181 - DNA, 360 bp, Artificial Sequence
  Synthetic oligonucleotide
gaggtgcagctgttggagtctgggggaggcttggtacagcctggggggtccctgcgtctctcctgtgcagcctccggattcacctttagtgcgaatggtatgcattgggtccgccaggctccagggaagggtctagagtgggtctcagtgattagtgctactggtgatcagacatactacgcagactccgtgaagggccggttcaccatctcccgcgacaattccaagaacacgctgtatctgcaaatgaacagcctgcgtgccgaggacaccgcggtatattactgtgcgaaaggttatgataggcgtcatcgtaagtttgactactggggtcagggaaccctggtcaccgtctcgagc

SEQ ID NO: 182 - protein, 120 aa, Artificial Sequence
  Synthetic peptide
EVQLLESGGGLVQPGGSLRLSCAASGFTFSANGMHWVRQAPGKGLEWVSVISATGDQTYYADSVKGRFTISRDNSKNTLYLQMNSLRAEDTAVYYCAKGYDRRHRKFDYWGQGTLVTVSS

SEQ ID NO: 183 - DNA, 360 bp, Artificial Sequence
  Synthetic oligonucleotide
gaggtgcagctgttggagtctgggggaggcttggtacagcctggggggtccctgcgtctctcctgtgcagcctccggattcacctttcgtgattattcgatggggtgggtccgccaggctccagggaagggtctagagtgggtctcagatattagtccgaatggtaagctgacatactacgcagactccgtgaagggccggttcaccatctcccgcgacaattccaagaacacgctgtatctgcaaatgaacagcctgcgtgccgaggacaccgcggtatattactgtgcgaaaatgtctaggaatcctgattttccgtttgactactggggtcagggaaccctggtcaccgtctcgagc

SEQ ID NO: 184 - protein, 120 aa, Artificial Sequence
  Synthetic peptide
EVQLLESGGGLVQPGGSLRLSCAASGFTFRDYSMGWVRQAPGKGLEWVSDISPNGKLTYYADSVKGRFTISRDNSKNTLYLQMNSLRAEDTAVYYCAKMSRNPDFPFDYWGQGTLVTVSS

SEQ ID NO: 185 - DNA, 363 bp, Artificial Sequence
  Synthetic oligonucleotide
gaggtgcagctgttggagtctgggggaggcttggtacagcctggggggtccctgcgtctctcctgtgcagcctccggattcaccttttctaattatacgatgggttgggtccgccaggctccagggaagggtctggagtgggtctcagatattaatggggagggtaatgctacatactacgcagactccgtgaagggccggttcaccatctcccgcgacaattccaagaacacgctgtatctgcaaatgaacagcctgcgtgccgaggacaccgcggtatattactgtgcgaaactgaatgtgtcgagtgctgagagtagttttgactactggggtcagggaaccctggtcaccgtctcgagc

SEQ ID NO: 186 - protein, 121 aa, Artificial Sequence
  Synthetic peptide
EVQLLESGGGLVQPGGSLRLSCAASGFTFSNYTMGWVRQAPGKGLEWVSDINGEGNATYYADSVKGRFTISRDNSKNTLYLQMNSLRAEDTAVYYCAKLNVSSAESSFDYWGQGTLVTVSS

SEQ ID NO: 187 - DNA, 357 bp, Artificial Sequence
  Synthetic oligonucleotide
gaggtgcagctgttggagtctgggggaggcttggtacagcctggggggtccctgcgtctctcctgtgcagcctccggattcacctttaagaggtatccgatggcgtgggtccgccaggctccagggaagggtctagagtgggtctcatggattaatcagtcgggtggtactacatactacgcagactccgtgaagggccggttcaccatctcccgcgacaattccaagaacacgctgtatctgcaaatgaacagcctgcgtgccgaggacaccgcggtatattactgtgcggaaggtgttgggtcttcgactagttttgactactggggtcagggaaccctggtcaccgtctcgagc

SEQ ID NO: 188 - protein, 119 aa, Artificial Sequence
  Synthetic peptide
EVQLLESGGGLVQPGGSLRLSCAASGFTFKRYPMAWVRQAPGKGLEWVSWINQSGGTTYYADSVKGRFTISRDNSKNTLYLQMNSLRAEDTAVYYCAEGVGSSTSFDYWGQGTLVTVSS

SEQ ID NO: 189 - DNA, 363 bp, Artificial Sequence
  Synthetic oligonucleotide
gaggtgcagctgttggagtctgggggaggcttggtacagcctggggggtccctgcgtctctcctgtgcagcctccggattcacctttgataattatgttatgttttgggtccgccaggctccagggaagggtctagagtgggtctcagatatttctcctaatggtgttatgacatactacgcagactccgtgaagggccggttcaccatctcccgcgacaattccaagaacacgctgtatctgcaaatgaacagcctgcgtgccgaggacaccgcggtatattactgtgcgaaagggcttagtgggtctgatattgtttcgtttgactactggggtcagggaaccctggtcaccgtctcgagc

SEQ ID NO: 190 - protein, 121 aa, Artificial Sequence
  Synthetic peptide
EVQLLESGGGLVQPGGSLRLSCAASGFTFDNYVMFWVRQAPGKGLEWVSDISPNGVMTYYADSVKGRFTISRDNSKNTLYLQMNSLRAEDTAVYYCAKGLSGSDIVSFDYWGQGTLVTVSS

SEQ ID NO: 191 - DNA, 363 bp, Artificial Sequence
  Synthetic oligonucleotide
gaggtgcagctgttggagtctgggggaggcttggtacagcctggggggtccctgcgtctctcctgtgcagcctccggattcacctttggtgcttatgatatggtttgggtccgccaggctccagggaggagtctagagtgggtctcagcgatttctaagcggggtggggctacatactacgcagactccgtgaagggccggttcaccatctcccgcgacaattccaagaacacgctgtatctgcaaatgaacagcctgcgtgccgaggacaccgcggtatattactgtgccaaacttcagcggctgtttgataagcggtcgtttgactactggggtcagggaaccctggtcaccgtctcgagc

SEQ ID NO: 192 - protein, 121 aa, Artificial Sequence
  Synthetic peptide
EVQLLESGGGLVQPGGSLRLSCAASGFTFGAYDMVWVRQAPGRSLEWVSAISKRGGATYYADSVKGRFTISRDNSKNTLYLQMNSLRAEDTAVYYCAKLQRLFDKRSFDYWGQGTLVTVSS

SEQ ID NO: 193 - DNA, 363 bp, Artificial Sequence
  Synthetic oligonucleotide
gaggtgcagctgttggagtctgggggaggcttggtacagcctggggggtccctgcgtctctcctgtgcagcctccggattcacctttgcgtcgtatccgatgggttgggtccgccaggctccagggaagggtctggagtgggtctcatttattaaggagcctggttctattacatactacgcagactccgtgaagggccggttcaccatctcccgcgacaattccaagaacacgctgtatctgcaaatgaacagcctgcgtgccgaggacaccgcggtatattactgtgcgaaaatgtataagggtccttctgggtatgattttgactactggggtcagggaaccctggtcaccgtctcgagc

SEQ ID NO: 194 - protein, 121 aa, Artificial Sequence
  Synthetic peptide
EVQLLESGGGLVQPGGSLRLSCAASGFTFASYPMGWVRQAPGKGLEWVSFIKEPGSITYYADSVKGRFTISRDNSKNTLYLQMNSLRAEDTAVYYCAKMYKGPSGYDFDYWGQGTLVTVSS

SEQ ID NO: 195 - DNA, 363 bp, Artificial Sequence
  Synthetic oligonucleotide
gaggtgcagctgttggagtctgggggaggcttggtacagcctggggggtccctgcgtctctcctgtgcagcctccggattcacctttaatgcggcgagtatgatgtgggtccgccaggctccagggaagggtctagagtgggtctcagatattggtccttctggtatgggtacatactacgcagactccgtgaagggccggttcaccatctcccgcgacaattccaagaacacgctgtatctgcaaatgaacagcctgcgtgccgaggacaccgcggtatattactgtgcgaaattttctccttatgagcatttgagtggttttgactactggggtcagggaaccctggtcaccgtctcgagc

SEQ ID NO: 196 - protein, 121 aa, Artificial Sequence
  Synthetic peptide
EVQLLESGGGLVQPGGSLRLSCAASGFTFNAASMMWVRQAPGKGLEWVSDIGPSGMGTYYADSVKGRFTISRDNSKNTLYLQMNSLRAEDTAVYYCAKFSPYEHLSGFDYWGQGTLVTVSS

SEQ ID NO: 197 - DNA, 357 bp, Artificial Sequence
  Synthetic oligonucleotide
gaggtgcagctgttggagtctgggggaggcttggtacagcctggggggtccctgcgtctctcctgtgcagcctccggattcacctttcctgaggagatgatgttgtgggtccgccaggctccagggaagggtctagagtgggtctcagatattgggcctgctggttatcctacatactacgcagactccgtgaagggccggttcaccatctcccgcgacaattccaagaacacgctgtatctgcaaatgaatagcctgcgtgccgaggacaccgcggtatattactgtgcgaaacataatcagaggcttggtaggtttgactactggggtcagggaaccctggtcaccgtctcgagc

SEQ ID NO: 198 - protein, 119 aa, Artificial Sequence
  Synthetic peptide
EVQLLESGGGLVQPGGSLRLSCAASGFTFPEEMMLWVRQAPGKGLEWVSDIGPAGYPTYYADSVKGRFTISRDNSKNTLYLQMNSLRAEDTAVYYCAKHNQRLGRFDYWGQGTLVTVSS

SEQ ID NO: 199 - DNA, 357 bp, Artificial Sequence
  Synthetic oligonucleotide
gaggtgcagctgttggagtctgggggaggcttggtacagcctggggggtccctgcgtctctcctgtgcagcctccggattcacctttcatgataagactatgatgtgggtccgccaggctccagggaagggtctagagtgggtctcagatattagtcctaatggtgcgtttacatactacgcagactccgtgaagggccggttcaccatctcccgcgacaattccaagaacacgctgtatctgcaaatgaacagcctgcgtgccgaggacaccgcggtatattactgtgcgaaacttggtaagacttctgggtcttttgactactggggtcagggaaccctggtcaccgtctcgagc

SEQ ID NO: 200 - protein, 119 aa, Artificial Sequence
  Synthetic peptide
EVQLLESGGGLVQPGGSLRLSCAASGFTFHDKTMMWVRQAPGKGLEWVSDISPNGAFTYYADSVKGRFTISRDNSKNTLYLQMNSLRAEDTAVYYCAKLGKTSGSFDYWGQGTLVTVSS

SEQ ID NO: 201 - DNA, 360 bp, Artificial Sequence
  Synthetic oligonucleotide
gaggtgcagctgttggagtctgggggaggcttggtacagcctggggggtccctgcgtctctcctgtgcagcctccggattcacctttcctggttatgagatggtttgggtccgccaggctccagggaagggtctagagtgggtctcagcgatttctgcgagtggtttgtatacatactacgcagactccgtgaagggccggttcaccatctcccgcgacaattccaagaacacgctgtatctgcaaatgaacagcctgcgtgccgaggacaccgcggtatattactgtgcgaaattgcctttgaatacttcgagtccgtttgactactggggtcagggaaccctggtcaccgtctcgagc

SEQ ID NO: 202 - protein, 120 aa, Artificial Sequence
  Synthetic peptide
EVQLLESGGGLVQPGGSLRLSCAASGFTFPGYEMVWVRQAPGKGLEWVSAISASGLYTYYADSVKGRFTISRDNSKNTLYLQMNSLRAEDTAVYYCAKLPLNTSSPFDYWGQGTLVTVSS

SEQ ID NO: 203 - DNA, 363 bp, Artificial Sequence
  Synthetic oligonucleotide
gaggtgcagctgttggagtctgggggaggcttggtacagcctggggggtccctgcgtctctcctgtgcagcctccggattcacctttgctcagtataatatggggtgggtccgccaggctccagggaagggtctagagtgggtctcaaatattgatccgaatggtactcggacatactacgcagactccgtgaagggccggttcaccatctcccgcgacaattccaagaacacgctgtatctgcaaatgaacagcctgcgtgccgaggacaccgcggtatattactgtgcgaaaaaggggcgtaggccttataagcttgagtttgactactggggtcagggaaccctggtcaccgtctcgagc

SEQ ID NO: 204 - protein, 121 aa, Artificial Sequence
  Synthetic peptide
EVQLLESGGGLVQPGGSLRLSCAASGFTFAQYNMGWVRQAPGKGLEWVSNIDPNGTRTYYADSVKGRFTISRDNSKNTLYLQMNSLRAEDTAVYYCAKKGRRPYKLEFDYWGQGTLVTVSS

SEQ ID NO: 205 - DNA, 360 bp, Artificial Sequence
  Synthetic oligonucleotide
gaggtgcagctgttggagtctgggggaggcttggtacagcctggggggtccctgcgtctctcctgtgcagcctccggattcacctttagtaggtatgggatgatgtgggtccgccaggctccagggaagggtctagagtgggtctcagatattgctccggatggtcgtgggacatactacgcagactccgtgaagggccggttcaccatctcccgcgacaattccaagagcacgctgtatctgcaaatgaacagcctgcgtgccgaggacaccgcggtatattactgtgcgaaaatgatgccgacttctacggtttcttttgactactggggtcagggaaccctggtcaccgtctcgagc

SEQ ID NO: 206 - protein, 120 aa, Artificial Sequence
  Synthetic peptide
EVQLLESGGGLVQPGGSLRLSCAASGFTFSRYGMMWVRQAPGKGLEWVSDIAPDGRGTYYADSVKGRFTISRDNSKSTLYLQMNSLRAEDTAVYYCAKMMPTSTVSFDYWGQGTLVTVSS

SEQ ID NO: 207 - DNA, 357 bp, Artificial Sequence
  Synthetic oligonucleotide
gaggtgcagctgttggagtctgggggaggcttggtacagcctggggggtccctgcgtctctcctgtgcagcctccggattcacctttggtaattatgctatggggtgggtccgccaggctccagggaagggtccagagtgggtctcagatattgatcatcttggtcatcatacatactacgcagactccgtgaagggccggttcaccatctcccgcgacaattccaagaacacgctgtatctgcaaatgaacagcctgcgtgccgaggacaccgcggtatattactgtgcgaaatttaatcagagtattcaggattttgactactggggtcagggaaccctggtcaccgtctcgagc

SEQ ID NO: 208 - protein, 119 aa, Artificial Sequence
  Synthetic peptide
EVQLLESGGGLVQPGGSLRLSCAASGFTFGNYAMGWVRQAPGKGPEWVSDIDHLGHHTYYADSVKGRFTISRDNSKNTLYLQMNSLRAEDTAVYYCAKFNQSIQDFDYWGQGTLVTVSS

SEQ ID NO: 209 - DNA, 357 bp, Artificial Sequence
  Synthetic oligonucleotide
gaggtgcagctgttggagtctgggggaggcttggtacagcctggggggtccctgcgtctctcctgtgcagcctccggattcaccttttatgtttatcctatgatgtgggtccgccaggctccagggaagggtctagagtgggtctcatctattgctgctgggggtgatacgacatactacgcagactccgtgaagggccggttcaccatctcccgcgacaattccaagaacacgctgtatctgcaaatgaacagcctgcgtgccgaggataccgcggtgtattactgtgcgaaacagtctggtaagaagcctatttttgactactggggtcagggaaccctggtcaccgtctcgagc

SEQ ID NO: 210 - protein, 119 aa, Artificial Sequence
  Synthetic peptide
EVQLLESGGGLVQPGGSLRLSCAASGFTFYVYPMMWVRQAPGKGLEWVSSIAAGGDTTYYADSVKGRFTISRDNSKNTLYLQMNSLRAEDTAVYYCAKQSGKKPIFDYWGQGTLVTVSS

SEQ ID NO: 211 - DNA, 357 bp, Artificial Sequence
  Synthetic oligonucleotide
gaggtgcagctgttggagtctgggggaggcttggtacagcctggggggtccctgcgtctctcctgtgcagcctccggattcaccttttctaagtatcctatgttttgggtccgccaggctccagggaaggatctagagtgggtctcagctattagtggtagtggtggtagcacatactacgcagactccgtgaagggccggttcaccatctcccgcgacaattccaagaacacgctgtatctgcaaatgaacagcctgcgtgccgaggacaccgcggtatattactgtgcgaaagatgcgccgaggtctcatacttttgactactggggtcagggaaccctggtcaccgtctcgagc

SEQ ID NO: 212 - protein, 119 aa, Artificial Sequence
  Synthetic peptide
EVQLLESGGGLVQPGGSLRLSCAASGFTFSKYPMFWVRQAPGKDLEWVSAISGSGGSTYYADSVKGRFTISRDNSKNTLYLQMNSLRAEDTAVYYCAKDAPRSHTFDYWGQGTLVTVSS

SEQ ID NO: 213 - DNA, 369 bp, Artificial Sequence
  Synthetic oligonucleotide
gaggtgcagctgttggagtctgggggaggcttggtacagcctggggggtccctgcgtctctcctgtgcagcctccggattcacctttagtaggtatgggatgatgtgggtccgccaggctccagggaagggtctagagtgggtctcagatattagttctaatggtaatcatacatactacgcagactccgtgaagggccggttcaccatctcccgcgacaattccaagaacacgctgtatctgcaaatgaacagcctgcgtgccgaggataccgcagtatattactgtgcgaaaatgggttcgacgaattctgagcttaatcctggttttgactactggggtcagggaaccctggtcaccgtctcgagc

SEQ ID NO: 214 - protein, 123 aa, Artificial Sequence
  Synthetic peptide
EVQLLESGGGLVQPGGSLRLSCAASGFTFSRYGMMWVRQAPGKGLEWVSDISSNGNHTYYADSVKGRFTISRDNSKNTLYLQMNSLRAEDTAVYYCAKMGSTNSELNPGFDYWGQGTLVTVSS

SEQ ID NO: 215 - DNA, 363 bp, Artificial Sequence
  Synthetic oligonucleotide
gaggtgcagctgttggagtctgggggaggcttggtacagcctggggggtccctgcgtctctcctgtgcagcctccggattcacctttgatactacttcgatggggtgggtccgccaggctccagggaagggtctggagtgggtctcagatatttctcctgatggtggtattacatactacgcagactccgtgaagggccggttcaccatctcccgcgacaattccaagaacacgctgtatctgcaaatgaacagcctgcgtgccgaggacaccgcggtatattactgtgcgaaatggccgactcgggggaataatactgtttttgactactggggtcagggaaccctggtcaccgtctcgagc

SEQ ID NO: 216 - protein, 121 aa, Artificial Sequence
  Synthetic peptide
EVQLLESGGGLVQPGGSLRLSCAASGFTFDTTSMGWVRQAPGKGLEWVSDISPDGGITYYADSVKGRFTISRDNSKNTLYLQMNSLRAEDTAVYYCAKWPTRGNNTVFDYWGQGTLVTVSS

SEQ ID NO: 217 - DNA, 360 bp, Artificial Sequence
  Synthetic oligonucleotide
gaggtgcagctgttggagtctgggggaggcttggtacagcctggggggtccctgcgtctctcctgtgcagcctccggattcacctttgctgatggtgatatgtggtgggtccgccaggctccagggaagggtctagagtgggtctcaggtattggtgtggagggtgatgttacatactacgcagactccgtgaagggccggttcaccatctcccgcgacaattccaagaacacgctgtatctgcaaatgaacagcctgcgtgccgaggacaccgcggtatattactgtgcgaaaaattggtcgcaggatattggggtgtttgactactggggtcagggaaccctggtcaccgtctcgagc

SEQ ID NO: 218 - protein, 120 aa, Artificial Sequence
  Synthetic peptide
EVQLLESGGGLVQPGGSLRLSCAASGFTFADGDMWWVRQAPGKGLEWVSGIGVEGDVTYYADSVKGRFTISRDNSKNTLYLQMNSLRAEDTAVYYCAKNWSQDIGVFDYWGQGTLVTVSS

SEQ ID NO: 219 - DNA, 366 bp, Artificial Sequence
  Synthetic oligonucleotide
gaggtgcagctgttggagtcagggggaggcttggtacagcctggggggtccctgcgtctctcctgtgcagcctccggattcacctttgttgattatccgatgttttgggtccgccaggctccagggaagggtctggagtgggtctcagatatttctgcttcgggtactaagacatactacgcagactccgtgaagggccggttcaccatctcccgcgacaattccaagaacacgctgtatctgcaaatgaacagcctgcgtgccgaggacaccgcggtatattactgtgcgaaaggttcttcttcgacttctcttatgcaggggtttgactactggggtcagggaaccctggtcaccgtctcgagc

SEQ ID NO: 220 - protein, 122 aa, Artificial Sequence
  Synthetic peptide
EVQLLESGGGLVQPGGSLRLSCAASGFTFVDYPMFWVRQAPGKGLEWVSDISASGTKTYYADSVKGRFTISRDNSKNTLYLQMNSLRAEDTAVYYCAKGSSSTSLMQGFDYWGQGTLVTVSS

SEQ ID NO: 221 - DNA, 363 bp, Artificial Sequence
  Synthetic oligonucleotide
gaggtgcagctgttggagtctgggggaggcttggtacagcctggggggtccctgcgtctctcctgtgcagcctccggattcacctttgagagtcaggatatgggttgggtccgccaggctccagggaagggtctagagtgggtctcactgattaatggggggggtacgaatacatactacgcagactccgtgaagggccggttcaccatctcccgcgacaattccaagaacacgctgtatctgcaaatgaacagcctgcgtgccgaggacaccgcggtatattactgtgcggaaagtggtaggatttctgatgataattggtttgactactggggtcagggaaccctggtcaccgtctcgagc

SEQ ID NO: 222 - protein, 121 aa, Artificial Sequence
  Synthetic peptide
EVQLLESGGGLVQPGGSLRLSCAASGFTFESQDMGWVRQAPGKGLEWVSLINGGGTNTYYADSVKGRFTISRDNSKNTLYLQMNSLRAEDTAVYYCAESGRISDDNWFDYWGQGTLVTVSS

SEQ ID NO: 223 - DNA, 360 bp, Artificial Sequence
  Synthetic oligonucleotide
gaggtgcagctgttggagtctgggggaggcttggtacagcctggggggtccctgcgtctctcctgtgcagcctccggattcacctttgatatggcggatatgacttgggtccgccaggctccagggaagggtctagagtgggtctcagatattgatgctgtgggttctaggacatactacgcagactccgtgaagggccggttcaccatctcccgcgacaattccaagaacacgctgtatctgcaaatgaacagcctgcgtgccgaggacaccgcggtatattactgtgcgaaaggttatcctagtaagactaatgattttgactactggggtcagggaaccctggtcaccgtctcgagc

SEQ ID NO: 224 - protein, 120 aa, Artificial Sequence
  Synthetic peptide
EVQLLESGGGLVQPGGSLRLSCAASGFTFDMADMTWVRQAPGKGLEWVSDIDAVGSRTYYADSVKGRFTISRDNSKNTLYLQMNSLRAEDTAVYYCAKGYPSKTNDFDYWGQGTLVTVSS

SEQ ID NO: 225 - DNA, 369 bp, Artificial Sequence
  Synthetic oligonucleotide
gaggtgcagctgttggagtctgggggaggcttggtacagcctggggggtccctgcgtctctcctgtgcagcctccggattcacctttgctaagtatgatatgatgtgggtccgccaggctccagggaagggtctagagtgggtctcagatattgatgcgtctggtaatactacatactacgcagactccgtgaagggccggttcaccatctcccgcgacaattccaagaacacgctgtatctgcaaatgaacagcctgcgtgccgaggataccgcggtatattactgtgcgaaactggatgggttggtttctggtccgcatcgtttttttgactactggggtcagggaaccctggtcaccgtctcgagc

SEQ ID NO: 226 - protein, 123 aa, Artificial Sequence
  Synthetic peptide
EVQLLESGGGLVQPGGSLRLSCAASGFTFAKYDMMWVRQAPGKGLEWVSDIDASGNTTYYADSVKGRFTISRDNSKNTLYLQMNSLRAEDTAVYYCAKLDGLVSGPHRFFDYWGQGTLVTVSS

SEQ ID NO: 227 - DNA, 357 bp, Artificial Sequence
  Synthetic oligonucleotide
gaggtgcagctgttggagtctgggggaggcttggtacagcctggggggtccctgcgtctctcctgtgcagcctccggattcacctttcttaataagcctatggcgtgggtccgccaggctccagggaagggtctagagtgggtctcatggattgcggatagtggtgagttgacatactacgcagactccgtgaagggccggttcaccatctcccgcgacaattccaagaacacgctgtatctgcaaatgaacagtctgcgtgccgaggataccgcggtatattactgtgcgaaaggtgatggtactaagggtagttttgactactggggtcagggaaccctggtcaccgtctcgagc

SEQ ID NO: 228 - protein, 119 aa, Artificial Sequence
  Synthetic peptide
EVQLLESGGGLVQPGGSLRLSCAASGFTFLNKPMAWVRQAPGKGLEWVSWIADSGELTYYADSVKGRFTISRDNSKNTLYLQMNSLRAEDTAVYYCAKGDGTKGSFDYWGQGTLVTVSS

SEQ ID NO: 229 - DNA, 351 bp, Artificial Sequence
  Synthetic oligonucleotide
gaggtgcagctgttggagtctgggggaggcttggtacagcctggggggtccctgcgtctctcctgtgcagcctccggattcacctttgggaatattactatgggttgggtccgccaggctccagggaagggtctagagtgggtctcagatattacgcggggtggtgatactacatactacgcagactccgtgaagggccggttcaccatctcccgcgacaattccaagaacacgctgtatctgcaaatgaacagcctgcgtgccgaggacaccgcggtatattactgtgcaaaactggaggatgggacttttgactactggggtcagggaaccctggtcaccgtctcgagc

SEQ ID NO: 230 - protein, 117 aa, Artificial Sequence
  Synthetic peptide
EVQLLESGGGLVQPGGSLRLSCAASGFTFGNITMGWVRQAPGKGLEWVSDITRGGDTTYYADSVKGRFTISRDNSKNTLYLQMNSLRAEDTAVYYCAKLEDGTFDYWGQGTLVTVSS

SEQ ID NO: 231 - DNA, 363 bp, Artificial Sequence
  Synthetic oligonucleotide
gaggtgcagctgttggagtctgggggaggcttggtacagcctggggggtccctgcgtctctcctgtgcagcctccggattcacctttagtgattcgcctatgtcgtgggtccgccaggctccagggaagggtctagagtgggtctcagatattagtgctgctggtcttagtacatactacgcagactccgtgaagggccggttcaccatctcccgcgacaattccaagaacacgctgtatctgcaaatgaacagcctgcgtgccgaggacaccgcggtatattactgtgcgaaagggtttcctaagcctaatcctgattggtttgactactggggtcagggaaccctggtcaccgtctcgagc

SEQ ID NO: 232 - protein, 121 aa, Artificial Sequence
  Synthetic peptide
EVQLLESGGGLVQPGGSLRLSCAASGFTFSDSPMSWVRQAPGKGLEWVSDISAAGLSTYYADSVKGRFTISRDNSKNTLYLQMNSLRAEDTAVYYCAKGFPKPNPDWFDYWGQGTLVTVSS

SEQ ID NO: 233 - DNA, 369 bp, Artificial Sequence
  Syntheticoligonucleotide
gaggtgcagctgttggagtctgggggaggcttggtacagcctggggggtccctgcgtctctcctgtgcagcctccggattcacctttgagggtagtaatatgcattgggtccgccaggctccagggaagggtctagagtggatctcagagattactaattctggtatgactacatactacgcagactccgtgaagggccggttcaccatctcccgcgacaattccaagaacacgctgtatctgcaaatgaacagcctgcgtgccgaggacaccgcggtatattactgtgcgaaaggtattattccgacgtcgtcggattcgttgtcttttgactactggggtcagggaaccctggtcaccgtctcgagc

SEQ ID NO: 234 - protein, 123 aa, Artificial Sequence
  Synthetic peptide
EVQLLESGGGLVQPGGSLRLSCAASGFTFEGSNMHWVRQAPGKGLEWISEITNSGMTTYYADSVKGRFTISRDNSKNTLYLQMNSLRAEDTAVYYCAKGIIPTSSDSLSFDYWGQGTLVTVSS

SEQ ID NO: 235 - DNA, 372 bp, Artificial Sequence
  Synthetic oligonucleotide
gaggtgcagctgttggagtctgggggaggcttggtacagcctggggggtccctgcgtctctcctgtgcagcctccggattcacctttgggcagtatatgatggggtgggtccgccaggctccagggaagggtctagagtgggtctcagatattgatccgtcgggtcattctacatactacgcagactccgtgaagggccggttcaccatctcccgcgacaattccaagaacacgctgtatctgcaaatgaacagcctgcgtgccgaggacaccgcggtatattactgtgcgaaatggccgttgagtgggcctatgtctgctccgtctgcttttgactactggggtcagggaaccctggtcaccgtctcgagc

SEQ ID NO: 236 - protein, 124 aa, Artificial Sequence
  Synthetic peptide
EVQLLESGGGLVQPGGSLRLSCAASGFTFGQYMMGWVRQAPGKGLEWVSDIDPSGHSTYYADSVKGRFTISRDNSKNTLYLQMNSLRAEDTAVYYCAKWPLSGPMSAPSAFDYWGQGTLVTVSS

SEQ ID NO: 237 - DNA, 372 bp, Artificial Sequence
  Synthetic oligonucleotide
gaggtgcagctgttggagtctgggggaggcttggtacagcctggggggtccctgcgtctctcctgtgcagcctccggattcacctttaataatagtcctatgttttgggtccgccaggctccagggaagggtctagagtgggtctcagatattgggccgagtggtactcctacatactacgcagactccgtgaagggccggttcaccatctcccgcgacaattccaagaacacgctgtatctgcaaatgaacagcctgcgtgccgaggacaccgcggtatattactgtgcgaaaggtccgattgcttcgggtacttcgttggttgctgggtttgactactggggtcagggaaccctggtcaccgtctcgagc

SEQ ID NO: 238 - protein, 124 aa, Artificial Sequence
  Synthetic peptide
EVQLLESGGGLVQPGGSLRLSCAASGFTFNNSPMFWVRQAPGKGLEWVSDIGPSGTPTYYADSVKGRFTISRDNSKNTLYLQMNSLRAEDTAVYYCAKGPIASGTSLVAGFDYWGQGTLVTVSS

SEQ ID NO: 239 - DNA, 354 bp, Artificial Sequence
  Synthetic oligonucleotide
gaggtgcagctgttggagtctgggggaggcttggtacagcctggggggtccctgcgtctctcctgtacagcctccggattcacctttgatcaggagactatgggttgggtccgccaggctccagggaagggtctggagtgggtctcagatatttcgggtcagggtgcgcatacatactacgcagactccgtgaagggccggttcaccatctcccgcgacaattccaagaacacgctgtatctgcaaatgaacagcctgcgtgccgaggacaccgcggtatattactgtgcgaaacttaattctaatgggtattttgactactggggtcagggaaccctggtcaccgtctcgagc

SEQ ID NO: 240 - protein, 118 aa, Artificial Sequence
  Synthetic peptide
EVQLLESGGGLVQPGGSLRLSCTASGFTFDQETMGWVRQAPGKGLEWVSDISGQGAHTYYADSVKGRFTISRDNSKNTLYLQMNSLRAEDTAVYYCAKLNSNGYFDYWGQGTLVTVSS

SEQ ID NO: 241 - DNA, 348 bp, Artificial Sequence
  Synthetic oligonucleotide
gaggtgcagctgttggagtctgggggaggcttggtacagcctggggggtccctgcgtctctcctgtgcagcctccggattcacctttccttcttataatatgcattgggtccgccaggctccagggaagggtctagagtgggtctcaggtatttcgccttctggtttgcatacatactacgcagactccgtgaagggccggttcaccatctcccgcgacaattccaagaacacgctgtatctgcaaatgaacagcctgcgtgccgaggacaccgcggtatattactgtgcgaaaaatgttcaggagtttgactactggggtcagggaaccctggtcaccgtctcgagc

SEQ ID NO: 242 - protein, 116 aa, Artificial Sequence
  Synthetic peptide
EVQLLESGGGLVQPGGSLRLSCAASGFTFPSYNMHWVRQAPGKGLEWVSGISPSGLHTYYADSVKGRFTISRDNSKNTLYLQMNSLRAEDTAVYYCAKNVQEFDYWGQGTLVTVSS

SEQ ID NO: 243 - DNA, 357 bp, Artificial Sequence
  Synthetic oligonucleotide
gaggtgcagctgttggagtctgggggaggcttggtacagcctggggggtccctgcgtctctcctgtgcagcctccggattcacctttcatgataagactatgatgtgggtccgccaggctccagggaagggtctagagtgggtctcagatattagtcctaatggtgcgtttacatactacgcagactccgtgaagggccggttcaccatctcccgcgacaattccaagaacacgctgtatctgcaaatgaacagcctgcgtgccgaggacaccgcggtatattactgtgcgaaacttggggatcagcttcggcattttgactactggggtcagggaaccctggtcaccgtctcgagc

SEQ ID NO: 244 - protein, 119 aa, Artificial Sequence
  Synthetic peptide
EVQLLESGGGLVQPGGSLRLSCAASGFTFHDKTMMWVRQAPGKGLEWVSDISPNGAFTYYADSVKGRFTISRDNSKNTLYLQMNSLRAEDTAVYYCAKLGDQLRHFDYWGQGTLVTVSS

SEQ ID NO: 245 - DNA, 369 bp, Artificial Sequence
  Synthetic oligonucleotide
gaggtgcagctgttggagtctgggggaggcttggtacagcctggggggtccctgcgtctctcctgtgcagcctccggattcacctttgatcattatttgatggggtgggtccgccaggctccagggaagggtctagagtgggtctcagatattgctcctagtggtcatcttacatactacgcagactccgtgaagggccggttcaccatctcccgcgacaattccaagaacacgctgtatctgcaaatgaacagcctgcgtgccgaggacaccgcggtatattactgtgcgaaatttcgggagaataatgcgcgggagaggtatgcttttgactactggggtcagggaaccctggtcaccgtctcgagc

SEQ ID NO: 246 - protein, 123 aa, Artificial Sequence
  Synthetic peptide
EVQLLESGGGLVQPGGSLRLSCAASGFTFDHYLMGWVRQAPGKGLEWVSDIAPSGHLTYYADSVKGRFTISRDNSKNTLYLQMNSLRAEDTAVYYCAKFRENNARERYAFDYWGQGTLVTVSS

SEQ ID NO: 247 - DNA, 369 bp, Artificial Sequence
  Synthetic oligonucleotide
gaggtgcagctgttggagtctgggggaggcttggtacagcctggggggtccctgcgtctctcctgtgcagcctccggattcacctttgagaggtatcctatgatgtgggtccgccaggctccagggaagggtctagagtgggtctcagatatttctccttctggtaatagtacatactacgcagactccgtgaagggccggttcaccatctcccgcgacaattccaagaacacgctgtatctgcaaatgaacagcctgcgtgccgaggacaccgcggtatattactgtgcgaaatttaagacgcttgcttctactagtctgccggcttttgactactggggtcagggaaccctggtcaccgtctcgagc

SEQ ID NO: 248 - protein, 123 aa, Artificial Sequence
  Synthetic peptide
EVQLLESGGGLVQPGGSLRLSCAASGFTFERYPMMWVRQAPGKGLEWVSDISPSGNSTYYADSVKGRFTISRDNSKNTLYLQMNSLRAEDTAVYYCAKFKTLASTSLPAFDYWGQGTLVTVSS

SEQ ID NO: 249 - DNA, 369 bp, Artificial Sequence
  Synthetic oligonucleotide
gaggtgcagctgttggagtctgggggaggcttggtacagcctggggggtccctgcgtctctcctgtgcagcctccggattcacctttgcggcgtatcctatgggttgggtccgccaggctccagggaagggtctagagtgggtctcagatattagtattagtggtcggtatacatactacgcagactccgtgaagggccggttcaccatctcccgcgacaattccaagaacacgctgtatctgcaaatgaacagcctgcgtgccgaggacaccgcggtatattactgtgcgaaatggcctaataggctgtcgggtgggggttcgctttttgactactggggtcagggaaccctggtcaccgtctcgagc

SEQ ID NO: 250 - protein, 123 aa, Artificial Sequence
  Synthetic peptide
EVQLLESGGGLVQPGGSLRLSCAASGFTFAAYPMGWVRQAPGKGLEWVSDISISGRYTYYADSVKGRFTISRDNSKNTLYLQMNSLRAEDTAVYYCAKWPNRLSGGGSLFDYWGQGTLVTVSS

SEQ ID NO: 251 - DNA, 351 bp, Artificial Sequence
  Synthetic oligonucleotide
gaggtgcagctgttggagtctgggggaggcttggtacagcctggggggtccctgcgtctctcctgtgcagcctccggattcacctttgcgggtacgaatatgtcttgggtccgccaggctccagggaagggtctagagtgggtctcagatattgatagtgatggttataagacatactacgcagactccgtgaagggccggttcaccatctcccgcgacaattccaagaacacgctgtatctgcaaatgaacagcctgcgtgccgaggacaccgcggtatattactgtgcgaaagggttgcctgggtcttttgactactggggtcagggaaccctggtcaccgtctcgagc

SEQ ID NO: 252 - protein, 117 aa, Artificial Sequence
  Synthetic peptide
EVQLLESGGGLVQPGGSLRLSCAASGFTFAGTNMSWVRQAPGKGLEWVSDIDSDGYKTYYADSVKGRFTISRDNSKNTLYLQMNSLRAEDTAVYYCAKGLPGSFDYWGQGTLVTVSS

SEQ ID NO: 253 - DNA, 348 bp, Artificial Sequence
  Synthetic oligonucleotide
gaggtgcagctgttggagtctgggggaggcttggtacagcctggggggtccctgcgtctctcctgtgcagcctccggattcaccttttctgcgtatcctatgcattgggtccgccaggctccagggaagggtctagagtgggtctcatctattgcttcttcgggtattacgacatactacgcagactccgtgaagggccggttcaccatctcccgcgacaattccaagaacacgctgtatctgcaaatgaacagcctgcgtgccgaggataccgcggtatattactgtgcgaaagatgttaatagttttgactactggggtcagggaaccctggtcaccgtctcgagc

SEQ ID NO: 254 - protein, 116 aa, Artificial Sequence
  Synthetic peptide
EVQLLESGGGLVQPGGSLRLSCAASGFTFSAYPMHWVRQAPGKGLEWVSSIASSGITTYYADSVKGRFTISRDNSKNTLYLQMNSLRAEDTAVYYCAKDVNSFDYWGQGTLVTVSS

SEQ ID NO: 255 - DNA, 354 bp, Artificial Sequence
  Synthetic oligonucleotide
gaggtgcagctgttggagtctgggggaggcttggtacagcctggggggtccctgcgtctctcctgtgcagcctccggattcacctttggtgagcatgttatgggttgggtccgccaggctccagggaagggtctagagtgggtctcagatattggtagtgctggtgctcctacatactacgcagactccgtgaagggccggttcaccatctcccgcgacaattccaagaacacgctgtatctgcaaatgaacagcctgcgtgccgaggacaccgcggtatattactgtgcgaaatggacgaaggctatgacgtttgactactggggtcagggaaccctggtcaccgtctcgagc

SEQ ID NO: 256 - protein, 118 aa, Artificial Sequence
  Synthetic peptide
EVQLLESGGGLVQPGGSLRLSCAASGFTFGEHVMGWVRQAPGKGLEWVSDIGSAGAPTYYADSVKGRFTISRDNSKNTLYLQMNSLRAEDTAVYYCAKWTKAMTFDYWGQGTLVTVSS

SEQ ID NO: 257 - DNA, 357 bp, Artificial Sequence
  Synthetic oligonucleotide
gaggtgcagctgttggagtctgggggaggcttggtacagcctggggggtccctgcgtctctcctgtgcagcctccggattcacctttaggtatggtaatatggggtgggtccgccaggctccagggaagggtctagagtgggtctcagcgattacggattatggtgagaggacatactacgcagactccgtgaagggccggttcaccatctcccgcgacaattccaagaacacgctgtatctgcaaatgaacagcctgcgtgccgaggacaccgcggtatattactgtgcgaaatttcatgaggctactgatgcgtttgactactggggtcagggaaccctggtcaccgtctcgagc

SEQ ID NO: 258 - protein, 119 aa, Artificial Sequence
  Synthetic peptide
EVQLLESGGGLVQPGGSLRLSCAASGFTFRYGNMGWVRQAPGKGLEWVSAITDYGERTYYADSVKGRFTISRDNSKNTLYLQMNSLRAEDTAVYYCAKFHEATDAFDYWGQGTLVTVSS

SEQ ID NO: 259 - DNA, 369 bp, Artificial Sequence
  Synthetic oligonucleotide
gaggtgcagctgttggagtctgggggaggcttggtacagcctggggggtccctgcgtctctcctgtgcagcctccggattcacctttgatggttatgctatgatgtgggtccgccaggctccagggaagggtctagagtgggtctcagatattaatgctaatggtacgactacatactacgcagactccgtgaagggccggttcaccatctcccgcgacaattccaagaacacgctgtatctgcaaatgaacagcctgcgtgccgaggacaccgcggtatattactgtgcgaaagggatgcctgcgccgcatgcgtcgcaggtgggttttgactactggggtcagggaaccctggtcaccgtctcgagc

SEQ ID NO: 260 - protein, 123 aa, Artificial Sequence
  Synthetic peptide
EVQLLESGGGLVQPGGSLRLSCAASGFTFDGYAMMWVRQAPGKGLEWVSDINANGTTTYYADSVKGRFTISRDNSKNTLYLQMNSLRAEDTAVYYCAKGMPAPHASQVGFDYWGQGTLVTVSS

SEQ ID NO: 261 - DNA, 357 bp, Artificial Sequence
  Synthetic oligonucleotide
gaggtgcagctgttggagtctgggggaggcttggtacagcctggggggtccctgcgtctctcctgtgcagcctccggattcacctttatggatacgggtatgatgtgggtccgccaggctccagggaagggtctagagtgggtctcagatattactcctgatggtggtcggacatactacgcagactccgtgaagggccggttcaccatctcccgcgacaattccaagaacacgctgtatctgcaaatgaacagcctgcgtgccgaggacaccgcggtatattactgtgcgaaactggatgcgtcggcgcagacgtttgactactggggtcagggaaccctggtcaccgtctcgagc

SEQ ID NO: 262 - protein, 119 aa, Artificial Sequence
  Synthetic peptide
EVQLLESGGGLVQPGGSLRLSCAASGFTFMDTGMMWVRQAPGKGLEWVSDITPDGGRTYYADSVKGRFTISRDNSKNTLYLQMNSLRAEDTAVYYCAKLDASAQTFDYWGQGTLVTVSS

SEQ ID NO: 263 - DNA, 348 bp, Artificial Sequence
  Synthetic oligonucleotide
gaggtgcagctgttggagtctgggggaggcttggtacagcctggggggtccctgcgtctctcctgtgcagcctccggattcacctttcctaagtattctatgttttgggtccgccaggctccagggaagggtctagagtgggtctcagctattagtggtagtggtggtagcacatactacgcagactccgtgaagggccggttcaccatctcccgcgacaattccaagaacacgctgtatctgcaaatgaacagcctgcgtgccgaggacaccgcggtatattactgtgcgaaagatcttcgtgcgtttgactactggggtcagggaaccctggtcaccgtctcgagc

SEQ ID NO: 264 - protein, 116 aa, Artificial Sequence
  Synthetic peptide
EVQLLESGGGLVQPGGSLRLSCAASGFTFPKYSMFWVRQAPGKGLEWVSAISGSGGSTYYADSVKGRFTISRDNSKNTLYLQMNSLRAEDTAVYYCAKDLRAFDYWGQGTLVTVSS

SEQ ID NO: 265 - DNA, 369 bp, Artificial Sequence
  Synthetic oligonucleotide
gaggtgcagctgttggagtctgggggaggcttggtacagcctggggggtccctgcgtctctcctgtgcagcctccggattcaccttttcggcgtatgatatgatgtgggtccgccaggctccagggaagggtctagagtgggtctcagatatttctaaggctggtgagattacatactacgcagactccgtgaagggccggttcaccatctcccgcgacaattccaagaacacgctgtatctgcaaatgaacagcctgcgtgccgaggacaccgcggtatattactgtgcgaaaatgacggtggcgccgcgggatgttgataatgcgtttgactactggggtcagggaaccctggtcaccgtctcgagc

SEQ ID NO: 266 - protein, 123 aa, Artificial Sequence
  Synthetic peptide
EVQLLESGGGLVQPGGSLRLSCAASGFTFSAYDMMWVRQAPGKGLEWVSDISKAGEITYYADSVKGRFTISRDNSKNTLYLQMNSLRAEDTAVYYCAKMTVAPRDVDNAFDYWGQGTLVTVSS

SEQ ID NO: 267 - DNA, 360 bp, Artificial Sequence
  Synthetic oligonucleotide
gaggtgcagctgttggagtctgggggaggcttggtacagcctggggggtccctgcgtctctcctgtgcagcctccggattcacctttgaggatacgcttatgttttgggtccgccaggctccagggaagggtctagagtgggtctcagatatttcgcctgatggtcatggtacatactacgcagactccgtgaagggccggttcaccatctcccgcgacaattccaagaacacgctgtatctgcaaatgaacagcctgcgtgccgaggacaccgcggtatattactgtgcgaaagtgcgtactctggagccgttgacttttgactactggggtcagggaaccctggtcaccgtctcgagc

SEQ ID NO: 268 - protein, 120 aa, Artificial Sequence
  Synthetic peptide
EVQLLESGGGLVQPGGSLRLSCAASGFTFEDTLMFWVRQAPGKGLEWVSDISPDGHGTYYADSVKGRFTISRDNSKNTLYLQMNSLRAEDTAVYYCAKVRTLEPLTFDYWGQGTLVTVSS

SEQ ID NO: 269 - DNA, 366 bp, Artificial Sequence
  Synthetic oligonucleotide
gaggtgcagctgttggagtctgggggaggcttggtacagcctggggggtccctgcgtctctcctgtgcagcctccggattcacctttgttaattatagtatgggttgggtccgccaggctccagggaagggtctagagtgggtctcagatatttctcctacgggttctaagacatactacgcagactccgtgaagggccggttcaccatctcccgcgacaattccaggaacacgctgtatctgcaaatgaacagcctgcgtgccgaggacaccgcggtatattactgtgcgaaatttccgcctatgcatcatcattattctacgtttgactactggggtcagggaaccctggtcaccgtctcgagc

SEQ ID NO: 270 - protein, 122 aa, Artificial Sequence
  Synthetic peptide
EVQLLESGGGLVQPGGSLRLSCAASGFTFVNYSMGWVRQAPGKGLEWVSDISPTGSKTYYADSVKGRFTISRDNSRNTLYLQMNSLRAEDTAVYYCAKFPPMHHHYSTFDYWGQGTLVTVSS

SEQ ID NO: 271 - DNA, 366 bp, Artificial Sequence
  Synthetic oligonucleotide
gaggtgcagctgttggagtctgggggaggcttggtacagcctggggggtccctgcgtctctcctgtgcagcctccggattcacctttaatcagcaggatatgagttgggtccgccaggctccagggaagggtctggagtgggtctcagatattagtcctgatggtgatgagacatactacgcagactccgtgaagggccggttcaccatctcccgcgacaattccaagaacacgctgtatctgcaaatgaacagcctgcgtgccgaggacaccgcggtatattactgtgcgaaagggctgccggttcagacgttggctactacttttgactactggggtcagggaaccctggtcaccgtctcgagc

SEQ ID NO: 272 - protein, 122 aa, Artificial Sequence
  Synthetic peptide
EVQLLESGGGLVQPGGSLRLSCAASGFTFNQQDMSWVRQAPGKGLEWVSDISPDGDETYYADSVKGRFTISRDNSKNTLYLQMNSLRAEDTAVYYCAKGLPVQTLATTFDYWGQGTLVTVSS

SEQ ID NO: 273 - DNA, 351 bp, Artificial Sequence
  Synthetic oligonucleotide
gaggtgcagctgttggagtctgggggaggcttggtacagcctggggggtccctgcgtctctcctgtgcagcctccggattcacctttggggatggtaatatgggttgggcccgccaggctccagggaagggtctagagtgggtctcagggatttcgggtcagtctacatactacgcagactccgtgaagggccggttcaccatctcccgcgacaattccaagaacacgctgtatctgcaaatgaacagcctgcgtgccgaggacactgcggtatattactgtgcgaaaatgaataatcatgatcctacttttgactactggggtcagggaaccctggtcaccgtctcgagc

SEQ ID NO: 274 - protein, 117 aa, Artificial Sequence
  Synthetic peptide
EVQLLESGGGLVQPGGSLRLSCAASGFTFGDGNMGWARQAPGKGLEWVSGISGQSTYYADSVKGRFTISRDNSKNTLYLQMNSLRAEDTAVYYCAKMNNHDPTFDYWGQGTLVTVSS

SEQ ID NO: 275 - DNA, 369 bp, Artificial Sequence
  Synthetic oligonucleotide
gaggtgcagctgttggagtctgggggaggcttggtacagcctggggggtccctgcgtctctcctgtgcagcctccggattcacctttgataattatgggatgatgtgggtccgccaggctccagggaagggtctagagtgggtctcagatattacgcaggatggtcgggatacatactacgcagactccgtgaagggccggttcaccatctcccgcgacaattccaagaacacgctgtatctgcaaatgaacagcctgcgtgccgaggacaccgcggtatattactgtgcgaaaatgcctccgccgagtggtaaggcgtttccttcgtttgactactggggtcagggaaccctggtcaccgtctcgagc

SEQ ID NO: 276 - protein, 123 aa, Artificial Sequence
  Synthetic peptide
EVQLLESGGGLVQPGGSLRLSCAASGFTFDNYGMMWVRQAPGKGLEWVSDITQDGRDTYYADSVKGRFTISRDNSKNTLYLQMNSLRAEDTAVYYCAKMPPPSGKAFPSFDYWGQGTLVTVSS

SEQ ID NO: 277 - DNA, 366 bp, Artificial Sequence
  Synthetic oligonucleotide
gaggtgcagctgttggagtctgggggaggcttggtacagcctggggggtccctgcgtctctcctgtgcagcctccggattcaccttttcgaattatgtgatggggtgggtccgccaggctccagggaagggtctagagtgggtctcagatattgattcgacgggtcgtagtacatactacgcagactccgtgaagggccggttcaccatctcccgcgataattccaagaacacgctgtatctgcaaatgaacagcctgcgtgccgaggataccgcggtatattactgtgcgaaatttccgatgagtttgactgctactttttcttttgactactggggtcagggaaccctggtcaccgtctcgagc

SEQ ID NO: 278 - protein, 122 aa, Artificial Sequence
  Synthetic peptide
EVQLLESGGGLVQPGGSLRLSCAASGFTFSNYVMGWVRQAPGKGLEWVSDIDSTGRSTYYADSVKGRFTISRDNSKNTLYLQMNSLRAEDTAVYYCAKFPMSLTATFSFDYWGQGTLVTVSS

SEQ ID NO: 279 - DNA, 366 bp, Artificial Sequence
  Synthetic oligonucleotide
gaggtgcagctgttggagtctgggggaggcttggtacagcctggggggtccctgcgtctctcctgtgcagcctccggattcacctttcatgataagactatgatgtgggtccgccaggctccagggaagggtctagagtgggtctcagatattagtcctaatggtgcgtttacatactacgcagactccgtgaagggccggttcaccatctcccgcgacaattccaagaacacgctgtatctgcaaatgaacagcctgcgtgccgaggacaccgcggtatattactgtgcgaaaatgtcgttggcgcggaagcctcctacttcttttgactactggggtcagggaaccctggtcaccgtctcgagc

SEQ ID NO: 280 - protein, 122 aa, Artificial Sequence
  Synthetic peptide
EVQLLESGGGLVQPGGSLRLSCAASGFTFHDKTMMWVRQAPGKGLEWVSDISPNGAFTYYADSVKGRFTISRDNSKNTLYLQMNSLRAEDTAVYYCAKMSLARKPPTSFDYWGQGTLVTVSS

SEQ ID NO: 281 - DNA, 369 bp, Artificial Sequence
  Synthetic oligonucleotide
gaggtgcagctgttggagtctgggggaggcttggtacagcctggggggtccctgcgtctctcctgtgcagcctccggattcacctttgatttgtatgatatggggtgggtccgccaggctccagggaagggtctagagtgggtctcagatattagtgcgaagggttctctgacatactacgcagactccgtgaagggccggttcaccatctcccgcgacaattccaagaacacgctgtatctgcaaatgaacagcctgcgtgccgaggacaccgcggtatattactgtgcgaaatttcctcggattgagtctagtcttacgactacttttgactactggggtcagggaaccctggtcaccgtctcgagc

SEQ ID NO: 282 - protein, 123 aa, Artificial Sequence
  Synthetic peptide
EVQLLESGGGLVQPGGSLRLSCAASGFTFDLYDMGWVRQAPGKGLEWVSDISAKGSLTYYADSVKGRFTISRDNSKNTLYLQMNSLRAEDTAVYYCAKFPRIESSLTTTFDYWGQGTLVTVSS

SEQ ID NO: 283 - DNA, 366 bp, Artificial Sequence
  Synthetic oligonucleotide
gaggtgcagctgttggagtctgggggaggcttggtacagcctggggggtccctgcgtctctcctgtgcagcctccggattcacctttgcggattattcgatgtattgggtccgccaggctccagggaagggtctagagtgggtctcagatattagtccttctggtagtatgacatactacgcagactccgtgaagggccggttcaccatctcccgcgacaattccaagaacacgctgtatctgcaaatgaacagcctgcgtgccgaggacaccgcggtatattactgtgcgaaaggtcttccggggcagaatatgcatgttgggtttgactactggggtcagggaaccctggtcaccgtctcgagc

SEQ ID NO: 284 - protein, 122 aa, Artificial Sequence
  Synthetic peptide
EVQLLESGGGLVQPGGSLRLSCAASGFTFADYSMYWVRQAPGKGLEWVSDISPSGSMTYYADSVKGRFTISRDNSKNTLYLQMNSLRAEDTAVYYCAKGLPGQNMHVGFDYWGQGTLVTVSS

SEQ ID NO: 285 - DNA, 348 bp, Artificial Sequence
  Synthetic oligonucleotide
gaggtgcagctgttggagtctgggggaggcttggtacagcctggggggtccctgcgtctctcctgtgcagcctccggattcacccttagtgatcatccgatgagttgggtccgccaggctccagggaagggtctagagtgggtctcatcgattagtaagcatggttcggtgacatactacgcagactccgtgaagggccggttcaccatctcccgcgacaattccaagaacacgctgtatctgcaaatgaacagcctgcgtgccgaggacaccgcggtatattactgtgtgaaacagactcgtcattatgatatctggggtcagggaaccctggtcaccgtctcgagc

SEQ ID NO: 286 - protein, 116 aa, Artificial Sequence
  Synthetic peptide
EVQLLESGGGLVQPGGSLRLSCAASGFTLSDHPMSWVRQAPGKGLEWVSSISKHGSVTYYADSVKGRFTISRDNSKNTLYLQMNSLRAEDTAVYYCVKQTRHYDIWGQGTLVTVSS

SEQ ID NO: 287 - DNA, 348 bp, Artificial Sequence
  Synthetic oligonucleotide
gaggtgcagctgttggagtctgggggaggcttggtacagcctggggggtccctgcgtctctcctgtgcagcctccagattcacctttcatgtgcagcctatgagttgggtccgccaggctccagggaagggtctagagtgggtctcatcgattagtaagcatggttcggtgacatactacgcagactccgtgaagggccggttcaccatctcccgcgacaattccaagaacacgctgtatctgcaaatgaacagcctgcgtgccgaggacaccgcggtatattactgtgtgaaacagactcgtcattatgatatctggggtcagggaaccctggtcaccgtctcgagc

SEQ ID NO: 288 - protein, 116 aa, Artificial Sequence
  Synthetic peptide
EVQLLESGGGLVQPGGSLRLSCAASRFTFHVQPMSWVRQAPGKGLEWVSSISKHGSVTYYADSVKGRFTISRDNSKNTLYLQMNSLRAEDTAVYYCVKQTRHYDIWGQGTLVTVSS

SEQ ID NO: 289 - DNA, 348 bp, Artificial Sequence
  Synthetic oligonucleotide
gaggtgcagctgttggagtctgggggaggcttggtacagcctggggggtccctgcgtctctcctgtgcagcctccggattcacctttcatgtgcagcctatgagttgggtccgccaggctccagggaagggtctagagtgggtctcatcgattagtaagcatggttcggtgacatactacgcagactccgtgaagggccggttcaccatctcccgcgacaattccaagaacacgctgtatctgcaaatgaacagcctgcgtgccgaggacaccgcggtatattactgtgtgaaacagactcgtcattatgatatctggggtcagggaaccctggtcaccgtctcgagc

SEQ ID NO: 290 - protein, 116 aa, Artificial Sequence
  Synthetic peptide
EVQLLESGGGLVQPGGSLRLSCAASGFTFHVQPMSWVRQAPGKGLEWVSSISKHGSVTYYADSVKGRFTISRDNSKNTLYLQMNSLRAEDTAVYYCVKQTRHYDIWGQGTLVTVSS

SEQ ID NO: 291 - DNA, 348 bp, Artificial Sequence
  Synthetic oligonucleotide
gaggtgcagctgttggagtctgggggaggcttggtacagcctggggggtccctgcgtctctcctgtgcagcctccggattcacctttaaggatgagcctattagttgggtccgccaggctccagggaagggtctagagtgggtctcatcgattagtaagcatggttcggtgacatactacgcagactccgtgaagggccggttcaccatctcccgcgacaattccaagaacacgctgtatctgcaaatgaacagcctgcgtgccgaggacaccgcggtatattactgtgtgaaacagactcgtcattatgatatctggggtcagggaaccctggtcaccgtctcgagc

SEQ ID NO: 292 - protein, 116 aa, Artificial Sequence
  Synthetic peptide
EVQLLESGGGLVQPGGSLRLSCAASGFTFKDEPISWVRQAPGKGLEWVSSISKHGSVTYYADSVKGRFTISRDNSKNTLYLQMNSLRAEDTAVYYCVKQTRHYDIWGQGTLVTVSS

SEQ ID NO: 293 - DNA, 348 bp, Artificial Sequence
  Synthetic oligonucleotide
gaggtgcagctgttggagtctgggggaggcttggtacagcctggggggtccctgcgtctctcctgtgcagcctccggattcacctttcgggatcattcgattagctgggtccgccaggctccagggaagggtctagagtgggtctcatcgattagtaagcatggttcggtgacatactacgcagactccgtgaagggccggttcaccatctctcgcgacaattccaagaacacgctgtatctgcaaatgaacagcctgcgtgccgaggacaccgcggtatattactgtgtgaaacagactcgtcattatgatatctggggtcagggaaccctggtcaccgtctcgagc

SEQ ID NO: 294 - protein, 116 aa, Artificial Sequence
  Synthetic peptide
EVQLLESGGGLVQPGGSLRLSCAASGFTFRDHSISWVRQAPGKGLEWVSSISKHGSVTYYADSVKGRFTISRDNSKNTLYLQMNSLRAEDTAVYYCVKQTRHYDIWGQGTLVTVSS

SEQ ID NO: 295 - DNA, 357 bp, Artificial Sequence
  Synthetic oligonucleotide
gaggtgcagctgttggagtctgggggaggcttggtacagcctggggggtccctgcgtctctcctgtgcagcctccggattcacctttagtgagactcagatggggtgggtccgccaggctccagggaagggtctagagtgggtctcagatattgatggtctgggtaattctacatactacgcagactccgtgaagggccggttcaccatctcccgcgacaattccaagaacacgctgtatctgcaaatgaacagcctgcgtgccgaggataccgcggtatattactgtgcgaaatggacgagtgcgtctatgttgtttgactactggggtcagggaaccctggtcaccgtctcgagc

SEQ ID NO: 296 - protein, 119 aa, Artificial Sequence
  Synthetic peptide
EVQLLESGGGLVQPGGSLRLSCAASGFTFSETQMGWVRQAPGKGLEWVSDIDGLGNSTYYADSVKGRFTISRDNSKNTLYLQMNSLRAEDTAVYYCAKWTSASMLFDYWGQGTLVTVSS

SEQ ID NO: 297 - DNA, 369 bp, Artificial Sequence
  Synthetic oligonucleotide
gaggtgcagctgttggagtctgggggaggcttggtacagcctggggggtccctgcgtctctcctgtgcagcctccggattcacctttggtcgttataatatggcgtgggtccgccaggctccagggaagggtctagagtgggtctcaaggatttcgcatgatggtaggaggacatactacgcagactccgtgaagggccggttcaccatctcccgcgacaattccaagaacacgctgtatctgcaaatgaacagcctgcgtgccgaggacaccgcggtatattactgtgcgaaaaggcctttgcgtgttgggtggtatggtgcggcttttgactactggggtcagggaaccctggtcaccgtctcgagc

SEQ ID NO: 298 - protein, 123 aa, Artificial Sequence
  Synthetic peptide
EVQLLESGGGLVQPGGSLRLSCAASGFTFGRYNMAWVRQAPGKGLEWVSRISHDGRRTYYADSVKGRFTISRDNSKNTLYLQMNSLRAEDTAVYYCAKRPLRVGWYGAAFDYWGQGTLVTVSS

SEQ ID NO: 299 - DNA, 366 bp, Artificial Sequence
  Synthetic oligonucleotide
  misc_feature 318, 323: n = A,T,C or G
gaggtgcagctgttggagtctgggggaggcttggtacagcctggggggtccctgcgtctctcctgtgcagcctccggattcacctttacttattatgatatgggttgggtccgccaggctccagggaagggtctagagtgggtctcacggatttctacttatggtcataggacatactacgcagactccgtgaagggccggttcaccatctcccgcgacaattccaagaacacgctgtatctgcaaatgaacagcctgcgtgccgaggataccgcggtatattactgtgcgaaaatgccgcgttattatgcgacggancgtangtttgactactggggtcagggaaccctggtcaccgtctcgagc

SEQ ID NO: 300 - protein, 122 aa, Artificial Sequence
  Synthetic peptide
  VARIANT 106, 108: Xaa = Any Amino Acid
EVQLLESGGGLVQPGGSLRLSCAASGFTFTYYDMGWVRQAPGKGLEWVSRISTYGHRTYYADSVKGRFTISRDNSKNTLYLQMNSLRAEDTAVYYCAKMPRYYATXRXFDYWGQGTLVTVSS

SEQ ID NO: 301 - DNA, 348 bp, Artificial Sequence
  Synthetic oligonucleotide
gaggtgcagctgttggagtctgggggaggcttggtacagcctggggggtccctgcgtctctcctgtgcagcctccggattcacctttactggttatcctatgcattgggtccgccaggctccagggaagggtctagagtgggtctcagctatttctgggagtggtaggtatacatactacgcagactccgtgaagggccggttcaccatctcccgcgacaattccaagaacacgctgtatctgcaaatgaacagcctgcgtgccgaggacaccgcggtatattactgtgcgaaaagggctacttcttttgactactggggtcagggaaccctggtcaccgtctcaagc

SEQ ID NO: 302 - protein, 116 aa, Artificial Sequence
  Synthetic peptide
EVQLLESGGGLVQPGGSLRLSCAASGFTFTGYPMHWVRQAPGKGLEWVSAISGSGRYTYYADSVKGRFTISRDNSKNTLYLQMNSLRAEDTAVYYCAKRATSFDYWGQGTLVTVSS

SEQ ID NO: 303 - DNA, 354 bp, Artificial Sequence
  Synthetic oligonucleotide
gaggtgcagctgttggagtctgggggaggcttggtacagcctggggggtccctgcgtctctcctgtgcagcctccggattcacctttgagaggtatcggatgcattgggtccgccaggctccagggaagggtctagagtgggtctcaagtattacgtcgggtggtgatgagacatactacgcagactccgtgaagggccggttcaccatctcccgcgacaattccaagaacacgctgtatctgcaaatgaacagcctgcgcgccgaggacaccgcggtatattactgtgcgaaactgtctccggggaagaggtttgactactggggtcagggaaccctggtcaccgtctcgagc

SEQ ID NO: 304 - protein, 118 aa, Artificial Sequence
  Synthetic peptide
EVQLLESGGGLVQPGGSLRLSCAASGFTFERYRMHWVRQAPGKGLEWVSSITSGGDETYYADSVKGRFTISRDNSKNTLYLQMNSLRAEDTAVYYCAKLSPGKRFDYWGQGTLVTVSS

SEQ ID NO: 305 - DNA, 348 bp, Artificial Sequence
  Synthetic oligonucleotide
  misc_feature 295, 304, 305: n = A,T,C or G
gaggtgcagctgttggagtctgggggaggcttggtacagcctggggggtccctgcgtctctcctgtgcagcctccggattcacctttagtggttataagatggggtgggtccgccaggctccagggaagggtctagagtgggtctcagctattaattctactggtggtcggacatactacgcagactccgtgaagggccggttcaccatctcccgcgacaattccaagaacacgctgtatctgcaaatgaacagcctgcgtgccgaggacaccgcggtatattactgtgcgaaanagcctgggnnttttgactactggggtcagggaaccctggtcaccgtctcgagc

SEQ ID NO: 306 - protein, 116 aa, Artificial Sequence
  Synthetic peptide
  VARIANT 99, 102: Xaa = Any Amino Acid
EVQLLESGGGLVQPGGSLRLSCAASGFTFSGYKMGWVRQAPGKGLEWVSAINSTGGRTYYADSVKGRFTISRDNSKNTLYLQMNSLRAEDTAVYYCAKXPGXFDYWGQGTLVTVSS

SEQ ID NO: 307 - DNA, 363 bp, Artificial Sequence
  Synthetic oligonucleotide
gaggtgcagctgttggagtctgggggaggcttggtacagcctggggggtccctgcgtctctcctgtgcagcctccggattcacctttaggagttatcagatggtttgggtccgccaggctccagggaagggtctagagtgggtctcaggtatttcttcgcatggtcatcgtacatactacgcagactccgtgaagggccggttcaccatctcccgcgacaattccaagaacacgctgtatctgcaaatgaacagcctgcgtgccgaggataccgcggtatattactgtgcgaaagttccttgggctgtgtcgaagacgcgttttgactactggggtcagggaaccctggtcaccgtctcgagc

SEQ ID NO: 308 - protein, 121 aa, Artificial Sequence
  Synthetic peptide
EVQLLESGGGLVQPGGSLRLSCAASGFTFRSYQMVWVRQAPGKGLEWVSGISSHGHRTYYADSVKGRFTISRDNSKNTLYLQMNSLRAEDTAVYYCAKVPWAVSKTRFDYWGQGTLVTVSS

SEQ ID NO: 309 - DNA, 366 bp, Artificial Sequence
  Synthetic oligonucleotide
gaggtgcagctgttggagtctgggggaggcttggtacagcctggggggtccctgcgtctctcctgtgcagcctccggattcacctttcggcagtattcgatggcgtgggtccgccaggctccagggaagggtctagagtgggtctcagctattagtggtagtggtggtagcacatactacgcagactccgtgaagggccggttcaccatctcccgcgacaattccaagaacacgctgtatctgcaaatgaacagcctgcgtgccgaggacaccgcggtatattactgtgcgaaaaagcctcggtcgaggtggcagggtacgctttttgactactggggtcagggaaccctggtcaccgtctcgagc

SEQ ID NO: 310 - protein, 122 aa, Artificial Sequence
  Synthetic peptide
EVQLLESGGGLVQPGGSLRLSCAASGFTFRQYSMAWVRQAPGKGLEWVSAISGSGGSTYYADSVKGRFTISRDNSKNTLYLQMNSLRAEDTAVYYCAKKPRSRWQGTLFDYWGQGTLVTVSS

SEQ ID NO: 311 - DNA, 369 bp, Artificial Sequence
  Synthetic oligonucleotide
gaggtgcagctgttggagtctgggggaggcttggtacagcctggggggtccctgcgtctctcctgtgcagcctccggattcacctttgctaggtatgcgatgtattgggtccgccaggctccagggaagggtctagagcgggtctcaggtatttctccgtctggttttaagacatactacgcagactccgtgaagggccggttcaccatctcccgcgacaattccaagaacacgctgtatctgcaaatgaacagcctgcgtgccgaggataccgcggtatattactgtgcgaaacatgtgcctggtagggagcttgggaagcgttattttgactactggggtcagggaaccctggtcaccgtctcgagc

SEQ ID NO: 312 - protein, 123 aa, Artificial Sequence
  Synthetic peptide
EVQLLESGGGLVQPGGSLRLSCAASGFTFARYAMYWVRQAPGKGLERVSGISPSGFKTYYADSVKGRFTISRDNSKNTLYLQMNSLRAEDTAVYYCAKHVPGRELGKRYFDYWGQGTLVTVSS

SEQ ID NO: 313 - DNA, 351 bp, Artificial Sequence
  Synthetic oligonucleotide
gaggtgcagctgttggagtctgggggaggcttggtacagcctggggggtccctgcgtctctcctgtgcagcctccggattcacctttggggaggggtatatggggtgggcccgccaggctccagggaagggtctagagtgggtctcagcgattgctccgagtggtgattatacatactacgcagactccgtgaagggccggttcaccatctcccgcgacgattccaagaacacgctgtatctgcaaatgaacagcctgcgtgccgaggacacggcggtatattactgtgcgaaagagcttgatgagagttttgactactggggtcagggaaccctggtcaccgtctcgagc

SEQ ID NO: 314 - protein, 117 aa, Artificial Sequence
  Synthetic peptide
EVQLLESGGGLVQPGGSLRLSCAASGFTFGEGYMGWARQAPGKGLEWVSAIAPSGDYTYYADSVKGRFTISRDDSKNTLYLQMNSLRAEDTAVYYCAKELDESFDYWGQGTLVTVSS

SEQ ID NO: 315 - DNA, 366 bp, Artificial Sequence
  Synthetic oligonucleotide
gaggtgcagctgttggagtctgggggaggcttggtacagcctggggggtccctgcgtctctcctgtgcagcctccggattcacctttagtatgtatccgatggtttgggtccgccaggctccagggaagggtctggagtgggtctcaacgattgctagtaatggtagtcttacatactacgcagactccgtgaagggccggttcaccatctcccgcgacaattccaagaacacgctgtatctgcaaatgaacagcctgcgtgccgaggacaccgcggtatattactgtgcgaaattgattaagtcttttgcgaagcggtatgagtttgactactggggtcagggaaccctggtcaccgtctcgagc

SEQ ID NO: 316 - protein, 122 aa, Artificial Sequence
  Synthetic peptide
EVQLLESGGGLVQPGGSLRLSCAASGFTFSMYPMVWVRQAPGKGLEWVSTIASNGSLTYYADSVKGRFTISRDNSKNTLYLQMNSLRAEDTAVYYCAKLIKSFAKRYEFDYWGQGTLVTVSS

SEQ ID NO: 317 - DNA, 348 bp, Artificial Sequence
  Synthetic oligonucleotide
gaggtgcagctgttggagtctgggggaggcttggtacagcctggggggtccctgcgtctctcctgtgcagcctccggattcacctttccgaggtatgctatgagttgggtccgccaggctccagggaagggtctagagtgggtctcaacgattggtcggactggtacgcttacatactacgcagactccgtgaagggccggttcaccatctcccgcgacaattccaagaacacgctgtatctgcaaatgaacagcctgcgtgccgaggacaccgcggtatattactgtgcgaaagcggggagtagttttgactactggggtcagggaaccctggtcaccgtctcgagc

SEQ ID NO: 318 - protein, 116 aa, Artificial Sequence
  Synthetic peptide
EVQLLESGGGLVQPGGSLRLSCAASGFTFPRYAMSWVRQAPGKGLEWVSTIGRTGTLTYYADSVKGRFTISRDNSKNTLYLQMNSLRAEDTAVYYCAKAGSSFDYWGQGTLVTVSS

SEQ ID NO: 319 - DNA, 354 bp, Artificial Sequence
  Synthetic oligonucleotide
gaggtgcagctgttggagtctgggggaggcttggtacagcctggggggtccctgcgtctctcctgtgcagcctccggattcacctttcatgataagactatgatgtgggtccgccaggctccagggaagggtctagagtgggtctcatggattagtcggactggtgcgagtacatactacgcagactccgtgaagggccggttcaccatctcccgcgacaattccaagaacacgctgtatctgcaaatgaacagcctgcgtgccgaggacaccgcggtctattactgtgcgaaacttggtcgtactaagcattttgactactggggtcagggaaccctggtcaccgtctcgagc

SEQ ID NO: 320 - protein, 118 aa, Artificial Sequence
  Synthetic peptide
EVQLLESGGGLVQPGGSLRLSCAASGFTFHDKTMMWVRQAPGKGLEWVSWISRTGASTYYADSVKGRFTISRDNSKNTLYLQMNSLRAEDTAVYYCAKLGRTKHFDYWGQGTLVTVSS

SEQ ID NO: 321 - DNA, 348 bp, Artificial Sequence
  Synthetic oligonucleotide
gaggtgcagctgttggagtctgggggaggcttggtacggcctggggggtccctgcgtctctcctgtgcagcctccggattcacctttagtgcgtataggatgtcttgggtccgccaggctccagggaagggtctagagtgggtctcatctattggtaaggatggtaatgtgacatactacgcagactccgtgaagggccggttcaccatctcccgcgacaattccaagaacacgctgtatctgcaaatgaacagcctgcgtgccgaggacaccgcggtatattactgtgcgaaattgcgtgctgggtttgactactggggtcagggaaccctggtcaccgtctctagc

SEQ ID NO: 322 - protein, 116 aa, Artificial Sequence
  Synthetic peptide
EVQLLESGGGLVRPGGSLRLSCAASGFTFSAYRMSWVRQAPGKGLEWVSSIGKDGNVTYYADSVKGRFTISRDNSKNTLYLQMNSLRAEDTAVYYCAKLRAGFDYWGQGTLVTVSS

SEQ ID NO: 323 - DNA, 348 bp, Artificial Sequence
  Synthetic oligonucleotide
gaggtgcagctgttggagtctgggggaggcttggtacagcctggggggtccctgcgtctctcctgtgcagcctccggattcacctttaggaagtatcatatgcattgggtccgccaggctcccgggaagggtctagagtgggtctcatcgattagtgataagggtgctgttacatactacgcagactccgtgaagggccggttcaccatctcccgcgacaattccaagaacacgctgtatctgcaaatgaacagcctgcgtgccgaggacaccgcggtatattactgtgcgaaagatgtggattcttttgactactggggtcagggaaccctggtcaccgtctcgagc

SEQ ID NO: 324 - protein, 116 aa, Artificial Sequence
  Synthetic peptide
EVQLLESGGGLVQPGGSLRLSCAASGFTFRKYHMHWVRQAPGKGLEWVSSISDKGAVTYYADSVKGRFTISRDNSKNTLYLQMNSLRAEDTAVYYCAKDVDSFDYWGQGTLVTVSS

SEQ ID NO: 325 - DNA, 351 bp, Artificial Sequence
  Synthetic oligonucleotide
gaggtgcagctgttggagtctgggggaggcttggtacagcctggggggtccctgcgtctctcctgtgcagcctccggattcacctttactaggtatgttatggggtgggtccgccaggctccagggaagggtctggagtgggtctcagatatttcgtctaatggttctaagacatactacgcagactccgtgaagggccggttcaccatctcccgcgacaattccaagaacacgctgtatctgcaaatgaacagcctgcgtgccgaggacaccgcggtatattactgtgcgaaacttcgtgatggtgtttttgactactggggtcagggaaccctggtcaccgtctcgagc

SEQ ID NO: 326 - protein, 117 aa, Artificial Sequence
  Synthetic peptide
EVQLLESGGGLVQPGGSLRLSCAASGFTFTRYVMGWVRQAPGKGLEWVSDISSNGSKTYYADSVKGRFTISRDNSKNTLYLQMNSLRAEDTAVYYCAKLRDGVFDYWGQGTLVTVSS

SEQ ID NO: 327 - DNA, 348 bp, Artificial Sequence
  Synthetic oligonucleotide
gaggtgcagctgttggagtctgggggaggcttggtacagcctggggggtccctgcgtctctcctgtgcagcctccggattcacctttgctacttatccgatgttttgggtccgccaggctccagggaagggtctagagtgggtctcagcgattgatgcgaagggtttggctacatactacgcagactccgtgaagggccggttcaccatctcccgcgacaattccaagaacacgctgtatctgcaaatgaacagcctgcgtgccgaggacaccgcggtatattactgtgcgaaaagtgcgacttcttttgactactggggtcagggaaccctggtcaccgtctcgagc

SEQ ID NO: 328 - protein, 116 aa, Artificial Sequence
  Synthetic peptide
EVQLLESGGGLVQPGGSLRLSCAASGFTFATYPMFWVRQAPGKGLEWVSAIDAKGLATYYADSVKGRFTISRDNSKNTLYLQMNSLRAEDTAVYYCAKSATSFDYWGQGTLVTVSS

SEQ ID NO: 329 - DNA, 351 bp, Artificial Sequence
  Synthetic oligonucleotide
gaggtgcagctgttggagtctgggggaggcttggtacagcctggggggtccctgcgtctctcctgtgcagcctccggattcacctttactaatctggatatggggtgggtccgccaggctccagggaagggtctggagtgggtctcagatattgatgctgggggtactactacatactacgcagactccgtgaagggccggttcaccatctcccgcgacaattccaagaacacgctgtatctgcaaatgaacagcctgcgtgccgaggacaccgcggtatattactgtgcgaaattgtcgtcgggtaattttgaactacgggggtcagggaccctggtcaccgtctcgagc

SEQ ID NO: 330 - protein, 117 aa, Artificial Sequence
  Synthetic peptide
EVQLLESGGGLVQPGGSLRLSCAASGFTFTNLDMGWVRQAPGKGLEWVSDIDAGGTTTYYADSVKGRFTISRDNSKNTLYLQMNSLRAEDTAVYYCAKLSSGNFELRGSGTLVTVSS

SEQ ID NO: 331 - DNA, 351 bp, Artificial Sequence
  Synthetic oligonucleotide
gaggtgcagctgttggagtctgggggaggcttggtacagcctggggggtccctgcgtctctcctgtgcagcctccggattcacctttgcggcttattcgatgatgtgggtccgccaggctccagggaagggtctagagtgggtctcagatattagtcctggtggtcggcatacatactacgcagactccgtgaagggccggttcaccatctcccgcgacaattccaagaacacgctgtatctgcaaatgaacagcctgcgtgccgaggacaccgcggtatattactgtgcgaaaatgggttctactacttttgactactggggtcagggaaccctggtcaccgtctcgagc

SEQ ID NO: 332 - protein, 117 aa, Artificial Sequence
  Synthetic peptide
EVQLLESGGGLVQPGGSLRLSCAASGFTFAAYSMMWVRQAPGKGLEWVSDISPGGRHTYYADSVKGRFTISRDNSKNTLYLQMNSLRAEDTAVYYCAKMGSTTFDYWGQGTLVTVSS

SEQ ID NO: 333 - DNA, 348 bp, Artificial Sequence
  Synthetic oligonucleotide
gaggtgcagctgttggagtctgggggaggcttggtacagcctggggggtccctgcgtctctcctgtgcagcctccggattcacctttacgagttatggtatggcgtgggtccgccaggctccagggaagggtctagagtgggtctcatggatttcgccggggggtaataggacatactacgcagactccgtgaagggccggttcaccatctcccgcgacaattccaagaacacgctgtatctgcaaatgaacagcctgcgtgccgaggacaccgcggtatattactgtgcggaagggtctgggagttttgactactggggtcagggaaccctggtcaccgtctcgagc

SEQ ID NO: 334 - protein, 116 aa, Artificial Sequence
  Synthetic peptide
EVQLLESGGGLVQPGGSLRLSCAASGFTFTSYGMAWVRQAPGKGLEWVSWISPGGNRTYYADSVKGRFTISRDNSKNTLYLQMNSLRAEDTAVYYCAEGSGSFDYWGQGTLVTVSS

SEQ ID NO: 335 - DNA, 348 bp, Artificial Sequence
  Synthetic oligonucleotide
gaggtgcagctgttggagtctgggggaggcttggtacagcctggggggtccctgcgtctctcctgtgcagcctccggattcacctttgcgcgttatgttatgcattgggtccgccaggctccagggaagggtctagagtgggtctcagctattagtcctgggggtcatcatacatactacgcagactccgtgaagggccggttcaccatctcccgcgacaattccaagaacacgctgtatctgcaaatgaacagcctgcgtgccgaggacaccgcggtatattactgtgcgaaaaggtctaagtattttgactactggggtcagggaaccctggtcaccgtctcgagc

SEQ ID NO: 336 - protein, 116 aa, Artificial Sequence
  Synthetic peptide
EVQLLESGGGLVQPGGSLRLSCAASGFTFARYVMHWVRQAPGKGLEWVSAISPGGHHTYYADSVKGRFTISRDNSKNTLYLQMNSLRAEDTAVYYCAKRSKYFDYWGQGTLVTVSS

SEQ ID NO: 337 - DNA, 348 bp, Artificial Sequence
  Synthetic oligonucleotide
gaggtgcagctgttggagtctgggggaggcttggtacagcctggggggtccctgcgtctctcctgtgcagcctccggattcacctttgttatgtatccgatgcattgggtccgccaggctccagggaagggtctggagtgggtctcacgtatttctgaagatggtcgtactacatactacgcatactccgtgaaggggcggttcaccgtctcccgcgacaattccaagaacaccctgtatctgcaaatgaaccccctgcatgccgaggataccgcggtatattactgtgcgaaagatattacaacgtttgactactggggtcagggaaccctggtcaccgtctcaagc

SEQ ID NO: 338 - protein, 116 aa, Artificial Sequence
  Synthetic peptide
EVQLLESGGGLVQPGGSLRLSCAASGFTFVMYPMHWVRQAPGKGLEWVSRISEDGRTTYYAYSVKGRFTVSRDNSKNTLYLQMNPLHAEDTAVYYCAKDITTFDYWGQGTLVTVSS

SEQ ID NO: 339 - DNA, 360 bp, Artificial Sequence
  Synthetic oligonucleotide
gaggtgcagctgttggagtctgggggaggcttggtacagcctggggggtccctgcgtctctcctgtgcagcctccggattcacctttacgcattatatgatggcgtgggtccgccaggctccagggaagggtctagagtgggtctcagctattaatagttcgggtgatattacatactacgcagactccgtgaagggccggttcaccatctcccgcgacaattccaagaacacgctgtatctgcaaatgaacagcctgcgtgccgaggataccgcggtatattactgtgcgaaagttcagcctactggtgatgcggtttttgactactggggtcagggaaccctggtcaccgtctcgagc

SEQ ID NO: 340 - protein, 120 aa, Artificial Sequence
  Synthetic peptide
EVQLLESGGGLVQPGGSLRLSCAASGFTFTHYMMAWVRQAPGKGLEWVSAINSSGDITYYADSVKGRFTISRDNSKNTLYLQMNSLRAEDTAVYYCAKVQPTGDAVFDYWGQGTLVTVSS

SEQ ID NO: 341 - DNA, 357 bp, Artificial Sequence
  Synthetic oligonucleotide
gaggtgcagctgttggagtctgggggaggcttggtacagcctggggggtccctgcgtctctcctgtgcagcctccggattcacctttgggcgttatactatgacttgggtccgccaggctccagggaagggtctagagtgggtctcatctattaagccttatggtggtcatacatactacgcagactccgtgaagggccggttcaccatctcccgcgacaattccaagaacacgctgtatctgcaaatgaacagcctgcgtgccgaggacaccgcggtatattactgtgcgaaaggtgtgccgcgtcctcgttggtttgactactggggtcagggaaccctggtcaccgtctcgagc

SEQ ID NO: 342 - protein, 119 aa, Artificial Sequence
  Synthetic peptide
EVQLLESGGGLVQPGGSLRLSCAASGFTFGRYTMTWVRQAPGKGLEWVSSIKPYGGHTYYADSVKGRFTISRDNSKNTLYLQMNSLRAEDTAVYYCAKGVPRPRWFDYWGQGTLVTVSS

SEQ ID NO: 343 - DNA, 369 bp, Artificial Sequence
  Synthetic oligonucleotide
gaggtgcagctgttggagtctgggggaggcttggtacagcctggggggtccctgcgtctctcctgtgcagcctccggattcacctttgggaggtatactatgtggtgggtccgccaggctccagggaagggtctagagtgggtctcagcgatttctccgcagggtcagcgtacatactacgcagactccgtgaagggccggttcaccatctcccgcgacaattccaagaacacgctgtatctgcaaatgaacagcctgcgtgccgaggacaccgcggtatattactgtgcgaaacgtaggtatcaggggtatcctatgagttcgcgttttgactactggggtcagggaaccctggtcaccgtctcgagc

SEQ ID NO: 344 - protein, 123 aa, Artificial Sequence
  Synthetic peptide
EVQLLESGGGLVQPGGSLRLSCAASGFTFGRYTMWWVRQAPGKGLEWVSAISPQGQRTYYADSVKGRFTISRDNSKNTLYLQMNSLRAEDTAVYYCAKRRYQGYPMSSRFDYWGQGTLVTVSS

SEQ ID NO: 345 - DNA, 360 bp, Artificial Sequence
  Synthetic oligonucleotide
gaggtgcagctgttggagtctgggggaggcttggtacagcctggggggtccctgcgtctctcctgtgcagcctccggattcacctttaagtcttattctatgatttgggtccgccaggctccagggaagggtctagagtgggtctcaagtattgatccggctggtaggggtacatactacgcagactccgtgaagggccggttcaccatctcccgcgacaattccaagaacacgctgtatctgcaaatgaacagcctgcgtgccgaggacaccgcggtatattactgtgcggaacagagtggggcgctggataggacgtttgactactggggtcagggaaccctggtcaccgtctcgagc

SEQ ID NO: 346 - protein, 120 aa, Artificial Sequence
  Synthetic peptide
EVQLLESGGGLVQPGGSLRLSCAASGFTFKSYSMIWVRQAPGKGLEWVSSIDPAGRGTYYADSVKGRFTISRDNSKNTLYLQMNSLRAEDTAVYYCAEQSGALDRTFDYWGQGTLVTVSS

SEQ ID NO: 347 - DNA, 357 bp, Artificial Sequence
  Synthetic oligonucleotide
gaggtgcagctgttggagtctgggggaggcttggtacagcctggggggtccctgcgtctctcctgtgcagcctccggattcacctttggtctttatcctatggcgtgggtccgccaggctccagggaagggtctggagtgggtctcatggattagtgctgagggtacttatacatactacgcagactccgtgaagggccggttcaccatctcccgcgacaattccgagaacacgctgtatctgcaaatgaacagcctgcgtgccgaggacaccgcggtatattactgtgcgaaaccgtattcgctgtatgatcagtttgactactggggtcagggaaccctggtcaccgtctcgagc

SEQ ID NO: 348 - protein, 119 aa, Artificial Sequence
  Synthetic peptide
EVQLLESGGGLVQPGGSLRLSCAASGFTFGLYPMAWVRQAPGKGLEWVSWISAEGTYTYYADSVKGRFTISRDNSENTLYLQMNSLRAEDTAVYYCAKPYSLYDQFDYWGQGTLVTVSS

SEQ ID NO: 349 - DNA, 360 bp, Artificial Sequence
  Synthetic oligonucleotide
gaggtgcagctgttggagtctgggggaggcttggtacagcctggggggtccctgcgtctctcctgtgcagcctccggattcacctttgaggattatgcgatggcgtgggtccgccaggctccagggaagggtctagagtgggtctcacggattagtcgtgagggtagtgtgacatactacgcagactccgtgaagggccggttcaccatctcccgcgacaattccaagaacacgctgtatctgcaaatgaacagcctgcgtgccgaggacaccgcggtatattactgtgcgaaacagagtaggatgcgtcgtcctatttttgactactggggtcagggaaccctggtcaccgtctcgagc

SEQ ID NO: 350 - protein, 120 aa, Artificial Sequence
  Synthetic peptide
EVQLLESGGGLVQPGGSLRLSCAASGFTFEDYAMAWVRQAPGKGLEWVSRISREGSVTYYADSVKGRFTISRDNSKNTLYLQMNSLRAEDTAVYYCAKQSRMRRPIFDYWGQGTLVTVSS

SEQ ID NO: 351 - DNA, 363 bp, Artificial Sequence
  Synthetic oligonucleotide
gaggtgcagctgttggagtctgggggaggcttggtacagcctggggggtccctgcgtctctcctgtgcagcctccggattcacctttgggaattattggatgatgtgggtccgccaggctccagggaggggtctagagtgggtctcagatattaatgagacgggtgatcagacatactacgcaaactccgtgaagggccggttcaccatctcccgcgacaattccaagaacacgctgtatctgcaaatgaacagcctgcgtgccgaggacaccgcggtatattactgtgcgaaattgattcggattgcttctcatttggattttgactactggggtcagggaaccctggtcaccgtctcgagc

SEQ ID NO: 352 - protein, 121 aa, Artificial Sequence
  Synthetic peptide
EVQLLESGGGLVQPGGSLRLSCAASGFTFGNYWMMWVRQAPGRGLEWVSDINETGDQTYYANSVKGRFTISRDNSKNTLYLQMNSLRAEDTAVYYCAKLIRIASHLDFDYWGQGTLVTVSS

SEQ ID NO: 353 - DNA, 360 bp, Artificial Sequence
  Synthetic oligonucleotide
gaggtgcagctgttggagtctgggggaggcttggtacagcccggggggtccctgcgtctctcctgtgcagcctccggattcaccttttctcattatgctatggcgtgggtccgccaggctccagggaagggtctagagtgggtctcaaggatttcttctaatggtggtaggacatactacgcagactccgtgaagggccggttcaccatctcccgcgacaattccaagaacacgctgtatctgcaaatgaacagcctgcgtgccgaggacaccgcggtatattactgtgcgaaacatggtgggggtacgcggtcgaggtttgactactggggtcagggaaccctggtcaccgtctcgagc

SEQ ID NO: 354 - protein, 120 aa, Artificial Sequence
  Synthetic peptide
EVQLLESGGGLVQPGGSLRLSCAASGFTFSHYAMAWVRQAPGKGLEWVSRISSNGGRTYYADSVKGRFTISRDNSKNTLYLQMNSLRAEDTAVYYCAKHGGGTRSRFDYWGQGTLVTVSS

SEQ ID NO: 355 - DNA, 357 bp, Artificial Sequence
  Synthetic oligonucleotide
gaggtgcagctgttggagtctgggggaggcttggtacagcctggggggtccctgcgtctctcctgtgcagcctccggattcaccttttctcgttatcctatgcattgggcccgccaggctccagggaagggtctagagtgggtctcatctatttctccgtctggtgtttctacatactacgcagactccgtgaagggccggttcatcatctcccgcgacaattccaagaacacgctgtatctgcaaatgaacagcctgcgtgccgaggacaccgcggtatattactgtgcgaaaccgtcgaatcctcgttattattttgactactggggtcagggaaccctggtcaccgtctcgagc

SEQ ID NO: 356 - protein, 119 aa, Artificial Sequence
  Synthetic peptide
EVQLLESGGGLVQPGGSLRLSCAASGFTFSRYPMHWARQAPGKGLEWVSSISPSGVSTYYADSVKGRFIISRDNSKNTLYLQMNSLRAEDTAVYYCAKPSNPRYYFDYWGQGTLVTVSS

SEQ ID NO: 357 - DNA, 360 bp, Artificial Sequence
  Synthetic oligonucleotide
gaggtgcagctgttggagtctgggggaggcttggtacagcctggggggtccctgcgtctctcctgtgcagcctccggattcacctttgagaagtatgcgatggcgtgggtccgccaggctccagggaagggtctggagtgggtctcacggatttcgatggctggtatgacgacatactacgcagactccgtgaagggccggttcaccatctcccgcgacaattccaagaacacgctgtatctgcaaatgaacagcctgcgtgccgaggataccgcggtatattactgtgcgaaacataagaagagtgcgcatactcgttttgactcctggggtcagggaaccctggtcaccgtctcgagc

SEQ ID NO: 358 - protein, 120 aa, Artificial Sequence
  Synthetic peptide
EVQLLESGGGLVQPGGSLRLSCAASGFTFEKYAMAWVRQAPGKGLEWVSRISMAGMTTYYADSVKGRFTISRDNSKNTLYLQMNSLRAEDTAVYYCAKHKKSAHTRFDSWGQGTLVTVSS

SEQ ID NO: 359 - DNA, 357 bp, Artificial Sequence
  Synthetic oligonucleotide
gaggtgcagctgttggagtctgggggaggcttggtacagcctggggggtccctgcgtctctcctgtgcagcctccggattcacctttgcgtcgtatgcgatgggttgggtccgccaggctccagggaagggtctagagtgggtctcagatatttcggtggatggtttgaagacatactacgcagactccgtgaagggccggttcaccatctcccgcgacaattccaggaacacgctgtatctgcaaatgaacagcctgcgtgccgaggacaccgcggtatattactgtgcgaaatgtggtccggggaaggagctgtttgactactggggtcagggaaccctggtcaccgtctcgagc

SEQ ID NO: 360 - protein, 119 aa, Artificial Sequence
  Synthetic peptide
EVQLLESGGGLVQPGGSLRLSCAASGFTFASYAMGWVRQAPGKGLEWVSDISVDGLKTYYADSVKGRFTISRDNSRNTLYLQMNSLRAEDTAVYYCAKCGPGKELFDYWGQGTLVTVSS

SEQ ID NO: 361 - DNA, 357 bp, Artificial Sequence
  Synthetic oligonucleotide
gaggtgcagctgttggagtctgggggaggcttggtacagcctggggggtccctgcgtctctcctgtgcagcctccggattcacctttaggcgttatacgatgatgtgggtccgccaggctccagggaagggtctggagtgggtctcagatattgatccgttgggtcatacgacatactacgcagactccgtgaagggccggttcaccatctcccgcgacaattccaacaacacgctgtatctgcaaatgaacagcctgcgtgccgaggataccgcggtatattactgtgcgaaactggattctaagtcgtatatttttgactactggggtcagggaaccctggtcaccgtctcgagc

SEQ ID NO: 362 - protein, 119 aa, Artificial Sequence
  Synthetic peptide
EVQLLESGGGLVQPGGSLRLSCAASGFTFRRYTMMWVRQAPGKGLEWVSDIDPLGHTTYYADSVKGRFTISRDNSNNTLYLQMNSLRAEDTAVYYCAKLDSKSYIFDYWGQGTLVTVSS

SEQ ID NO: 363 - DNA, 360 bp, Artificial Sequence
  Synthetic oligonucleotide
gaggtgcagctgttggagtctgggggaggcttggtacagcctggggggtccctgcgtctctcctgtgcagcctccggattcaccttttctcggtatcggatggcttgggtccgccaggctccagggaagggtctagagtgggtctcacagatttcttcgggtggtaagcatacatactacgcagactccgtgaagggccggttcaccatctcccgcgacaattccaagaacacgctgtatctgcaaatgaacagcctgcgtgccgaggacaccgcggtatattactgtgcgaaagcgtctcaggggagggtgtctgggtttgactactggggtcaggggaccctggtcaccgtctcgagc

SEQ ID NO: 364 - protein, 120 aa, Artificial Sequence
  Synthetic peptide
EVQLLESGGGLVQPGGSLRLSCAASGFTFSRYRMAWVRQAPGKGLEWVSQISSGGKHTYYADSVKGRFTISRDNSKNTLYLQMNSLRAEDTAVYYCAKASQGRVSGFDYWGQGTLVTVSS

SEQ ID NO: 365 - DNA, 372 bp, Artificial Sequence
  Synthetic oligonucleotide
gaggtgcagctgttggagtctgggggaggcttggtacagcctggggggtccctgcgtctctcctgtgcagcctccggattcacctttgatgggtatatgatgcattgggtccgccaggctccagggaagggtctagagtgggtctcaagtattaatcctactggtactcatacatactacgcagactccgtgaagggccggttcaccatctcccgcgacaattccaagaacacgctgtatctgcaaatgaacagcctgcgtgccgaggacaccgcggtatattactgtgcgaaaatgtatgataggatgaatgatccgtcttcgagttcttttgactactggggtcagggaaccctggtcaccgtctcgagc

SEQ ID NO: 366 - protein, 124 aa, Artificial Sequence
  Synthetic peptide
EVQLLESGGGLVQPGGSLRLSCAASGFTFDGYMMHWVRQAPGKGLEWVSSINPTGTHTYYADSVKGRFTISRDNSKNTLYLQMNSLRAEDTAVYYCAKMYDRMNDPSSSSFDYWGQGTLVTVSS

SEQ ID NO: 367 - DNA, 357 bp, Artificial Sequence
  Synthetic oligonucleotide
gaggtgcagctgttggagtctgggggaggcttggtacagcctggggggtccctgcgtctctcctgtgcagcctccggattcacctttgggcgttattcgatgcattgggtccgccaggctccagggaagggtctagagtgggtctcaactattaattcgattggtactgcgacatactacgcagactccgtgaagggccggttcaccatctcccgcgacaattccaagaacacgctgtatctgcaaatgaacagcctgcgtgccgaggacaccgcggtatattactgtgcgaaatctgggtatcgtcttaatcgttttgactactggggtcagggaaccctggtcaccgtctcgagc

SEQ ID NO: 368 - protein, 119 aa, Artificial Sequence
  Synthetic peptide
EVQLLESGGGLVQPGGSLRLSCAASGFTFGRYSMHWVRQAPGKGLEWVSTINSIGTATYYADSVKGRFTISRDNSKNTLYLQMNSLRAEDTAVYYCAKSGYRLNRFDYWGQGTLVTVSS

SEQ ID NO: 369 - DNA, 360 bp, Artificial Sequence
  Synthetic oligonucleotide
  misc_feature 184: n = A,T,C or G
gaggtgcagctgttggagtctgggggaggcttggtacagcctggggggtccctgcgtctctcctgtgcagcctccggattcacctttatgcggtatactatgatgtgggtccgccaggctccagggaagggtctggagtgggtctcaaatattgatcctcggggtacgaatacatactacacanactccgtgaagggccggttcaccatctcccgcgacaattccaagaacacgctgtatctgcaaatgaacagcctgcgtgccgaggacaccgcggtatattactgtgcgaaactgtcgtttcatgctccgtattcttttgactactggggtcagggaaccctggtcaccgtctcgagc

SEQ ID NO: 370 - protein, 120 aa, Artificial Sequence
  Synthetic peptide
  VARIANT 62: Xaa = Any Amino Acid
EVQLLESGGGLVQPGGSLRLSCAASGFTFMRYTMMWVRQAPGKGLEWVSNIDPRGTNTYYTXSVKGRFTISRDNSKNTLYLQMNSLRAEDTAVYYCAKLSFHAPYSFDYWGQGTLVTVSS

SEQ ID NO: 371 - DNA, 360 bp, Artificial Sequence
  Synthetic oligonucleotide
gaggtgcagctgttggagtctgggggaggcttggtacagcctggggggtccctgcgtctctcctgtgcagcctccggattcacctttatgcggtatactatgatgtgggtccgccaggctccagggaagggtctggagtgggtctcagatattgatcctcggggtacgaatacatactacgcagactccgtgaagggccggttcaccatctcccgcgacaattccaagaacacgctgtatctgcaaatgaacagcctgcgtgccgaggacaccgcggtatattactgtgcgaaactgtcgtttcatgctccgtattcttttgactactggggtcagggaaccctggtcaccgtctcgagc

SEQ ID NO: 372 - protein, 120 aa, Artificial Sequence
  Synthetic peptide
EVQLLESGGGLVQPGGSLRLSCAASGFTFMRYTMMWVRQAPGKGLEWVSDIDPRGTNTYYADSVKGRFTISRDNSKNTLYLQMNSLRAEDTAVYYCAKLSFHAPYSFDYWGQGTLVTVSS

SEQ ID NO: 373 - DNA, 360 bp, Artificial Sequence
  Synthetic oligonucleotide
gaggtgcagctgttggagtctgggggaggcttggtacagcctggggggtccctgcgtctctcctgtgcagcctccggattcacctttcagacgtataatatgtattgggtccgccaggctccagggaagggtctggagtgggtctcacggattaatgggcctggtacgcgtacatactacgcagactccgtgaagggccggttcaccatctcccgcgacaattccaagaacacgctgtatctgcaaatgaacagcctgcgtgccgaggacaccgcggtatattactgtgcgaaaaggaatcttcatcgggggccgatttttgactactggggtcagggaaccctggtcaccgtctcgagc

SEQ ID NO: 374 - protein, 120 aa, Artificial Sequence
  Synthetic peptide
EVQLLESGGGLVQPGGSLRLSCAASGFTFQTYNMYWVRQAPGKGLEWVSRINGPGTRTYYADSVKGRFTISRDNSKNTLYLQMNSLRAEDTAVYYCAKRNLHRGPIFDYWGQGTLVTVSS

SEQ ID NO: 375 - DNA, 363 bp, Artificial Sequence
  Synthetic oligonucleotide
gaggtgcagctgttggagtctgggggaggcttggtacagcctggggggtccctgcgtctctcctgtgcagcctccggattcacctttggtttttatgagatggcttgggtccgccaggctccagggaagggtctagagtgggtctcacgtattaatgctcgtggttctgggacatactacgcagactccgtgaagggccggttcaccatctcccgcgacaattccaagaacacgctgtatctgcaaatgaacagcctgcgtgccgaggataccgcggtatattactgtgcgaaacgggggagtcggctgtatgggcctccgtttgactactggggtcagggaaccctggtcaccgtctcgagc

SEQ ID NO: 376 - protein, 121 aa, Artificial Sequence
  Synthetic peptide
EVQLLESGGGLVQPGGSLRLSCAASGFTFGFYEMAWVRQAPGKGLEWVSRINARGSGTYYADSVKGRFTISRDNSKNTLYLQMNSLRAEDTAVYYCAKRGSRLYGPPFDYWGQGTLVTVSS

SEQ ID NO: 377 - DNA, 363 bp, Artificial Sequence
  Synthetic oligonucleotide
gaggtgcagctgttggagtctgggggaggcttggtacagcctggggggtccctgcgtctctcctgtgcagcctccggattcacctttgcggattatccgatgacgtgggtccgccaggctccagggaagggcctagagtgggtctcacagatttcgcgtactggtcatcctacatactacgcagactccgtgaagggccggttcaccatctcccgcgacaattccaagaacacgctgtatctgcaaatgaacagcctgcgtgccgaggataccgcggtatattactgtgcgaaacatattggttctgttatgcgtcctgggtttgactactggggtcagggaaccctggtcaccgtctcgagc

SEQ ID NO: 378 - protein, 121 aa, Artificial Sequence
  Synthetic peptide
EVQLLESGGGLVQPGGSLRLSCAASGFTFADYPMTWVRQAPGKGLEWVSQISRTGHPTYYADSVKGRFTISRDNSKNTLYLQMNSLRAEDTAVYYCAKHIGSVMRPGFDYWGQGTLVTVSS

SEQ ID NO: 379 - DNA, 360 bp, Artificial Sequence
  Synthetic oligonucleotide
gaggtgcagctgttggagtctgggggaggcttggtacagcctggggggtccctgcgtctctcctgtgcagcctccggattcacctttccttcttataatatgcattgggtccgccaggctccagggaagggtctagagtgggtctcaacgattgggccgactggtcttcggacatactacgcagactccgtgaagggccggttcaccatctcccgcgacaattccaagaacacgctgtatctgcaaatgaacagcctgcgtgccgaggataccgcggtatattactgtgcgaaaaattatctgaagcatcttcgtcggtttgactactggggtcagggaaccctggtcaccgtctcgagc

SEQ ID NO: 380 - protein, 120 aa, Artificial Sequence
  Synthetic peptide
EVQLLESGGGLVQPGGSLRLSCAASGFTFPSYNMHWVRQAPGKGLEWVSTIGPTGLRTYYADSVKGRFTISRDNSKNTLYLQMNSLRAEDTAVYYCAKNYLKHLRRFDYWGQGTLVTVSS

SEQ ID NO: 381 - DNA, 357 bp, Artificial Sequence
  Synthetic oligonucleotide
gaggtgcagctgttggagtctgggggaggcttggtacagcctggggggtccctgcgtctctcctgtgcagcctccggattcacctttgagaattatgatatgggttgggtccgccaggctccagggaagggtctagagtgggtctcacgtatttctacttttggtaggcgtacatactacgcagactccgtgaagggccggttcaccatctcccgcgacaattccaagaacacgctgtatctgcaaatgaacagcctgcgtgccgaggataccgcggtatattactgtgcgaaagtgaagtcttattcggttaggtttgactactggggtcagggaaccctggtcaccgtctcgagc

SEQ ID NO: 382 - protein, 119 aa, Artificial Sequence
  Synthetic peptide
EVQLLESGGGLVQPGGSLRLSCAASGFTFENYDMGWVRQAPGKGLEWVSRISTFGRRTYYADSVKGRFTISRDNSKNTLYLQMNSLRAEDTAVYYCAKVKSYSVRFDYWGQGTLVTVSS

SEQ ID NO: 383 - DNA, 360 bp, Artificial Sequence
  Synthetic oligonucleotide
gaggtgcagctgttggagtctgggggaggcttggtacagcctggggggtccctgcgtctctcctgtgcagcctccggattcacctttcggtcttattatatggggtgggtccgccaggctccagggaagggtctagagtgggtctcatggattgatacgaagggttcgtctacatactacgcagactccgtgaagggccggttcaccatctcccgcgacaattccaagaacacgctgtatctgcaaatgaacagcctgcgtgccgaggacaccgcggtatattactgtgcgcaaattatttattcgggtgatgtgcattttgactactggggtcagggaaccctggtcaccgtctcgagc

SEQ ID NO: 384 - protein, 120 aa, Artificial Sequence
  Synthetic peptide
EVQLLESGGGLVQPGGSLRLSCAASGFTFRSYYMGWVRQAPGKGLEWVSWIDTKGSSTYYADSVKGRFTISRDNSKNTLYLQMNSLRAEDTAVYYCAQIIYSGDVHFDYWGQGTLVTVSS

SEQ ID NO: 385 - DNA, 369 bp, Artificial Sequence
  Synthetic oligonucleotide
gaggtgcagctgttggagtctgggggaggcttggtacagcctggggggtccctgcgtctctcctgtgcagcctccggattcacctttgagaggtattcgatgatgtgggtccgccaggctccagggaagggtctagagtgggtctcagatatttcggcttctggtacgaggacatactacgcagactccgtgaagggccggttcaccatctcccgcgacaattccaagaacacgctgtatctgcaaatgaacagcctgcgtgccgaggataccgcggtatattactgtgcgaaaggggtgcgtattcttcggagtcgtttgccgggttttgactactggggtcagggaaccctggtcaccgtctcgagc

SEQ ID NO: 386 - protein, 123 aa, Artificial Sequence
  Synthetic peptide
EVQLLESGGGLVQPGGSLRLSCAASGFTFERYSMMWVRQAPGKGLEWVSDISASGTRTYYADSVKGRFTISRDNSKNTLYLQMNSLRAEDTAVYYCAKGVRILRSRLPGFDYWGQGTLVTVSS

SEQ ID NO: 387 - DNA, 360 bp, Artificial Sequence
  Synthetic oligonucleotide
gaggtgcagctgttggagtctgggggaggcttggtacagcctggggggtccctgcgtctctcctgtgcagcctccggattcacctttattacggagcctatgatgtgggtccgccaggctccagggaagggtctagagtgggtctcagctattgctcctgcgggtacgggtacatactacgcagactccgtgaagggccggttcaccatctcccgcgacaattccaagaacacgctgtatctgcaaatgaacagcctgcgtgccgaggacaccgcggtatattactgtgcgacacttaatagggatccttctgggcagtttgactactggggtcagggaaccctggtcaccgtctcgagc

SEQ ID NO: 388 - protein, 120 aa, Artificial Sequence
  Synthetic peptide
EVQLLESGGGLVQPGGSLRLSCAASGFTFITEPMMWVRQAPGKGLEWVSAIAPAGTGTYYADSVKGRFTISRDNSKNTLYLQMNSLRAEDTAVYYCATLNRDPSGQFDYWGQGTLVTVSS

SEQ ID NO: 389 - DNA, 354 bp, Artificial Sequence
  Synthetic oligonucleotide
gaggtgcagctgttggagtctgggggaggcttggtacagcccggggggtccctgcgtctctcctgtgcagcctccggattcacctttccgcggacgcctatgcattgggtccgccaggctccagggaagggtctcgagtgggtctcagcgatttcgcctagtggttctgctacatactacgcagactccgtgaagggccggttcaccatctcccgcgacaattccaagaacacgctgtatctgcaaatgaacagcctgcgtgccgaggacaccgcggtatattactgtgcggaacgtgctacttctgaggcttttgactactggggtcagggaaccctggtcaccgtctcgagc

SEQ ID NO: 390 - protein, 118 aa, Artificial Sequence
  Synthetic peptide
EVQLLESGGGLVQPGGSLRLSCAASGFTFPRTPMHWVRQAPGKGLEWVSAISPSGSATYYADSVKGRFTISRDNSKNTLYLQMNSLRAEDTAVYYCAERATSEAFDYWGQGTLVTVSS

SEQ ID NO: 391 - DNA, 357 bp, Artificial Sequence
  Synthetic oligonucleotide
gaggtgcagctgttggagtttgggggaggcttggtacagcctggggggtccctgcgtctctcctgtacagcctccggattcaccttttcgaggtatactatgggttgggtccgccaggctccagggaagggtctggagtgggtctcagctattagtcctccgggttctaagacatactacgcagactccgtgaagggccggttcaccatctcccgcgacaattccaagaacacgctgtatctgcaaatgaacagcctgcgtgccgaggacaccgcggtatattactgtgcgaaaggtgggatttggcgtggtcgttttgactactggggtcagggaaccctggtcaccgtctcgagc

SEQ ID NO: 392 - protein, 119 aa, Artificial Sequence
  Synthetic peptide
EVQLLEFGGGLVQPGGSLRLSCTASGFTFSRYTMGWVRQAPGKGLEWVSAISPPGSKTYYADSVKGRFTISRDNSKNTLYLQMNSLRAEDTAVYYCAKGGIWRGRFDYWGQGTLVTVSS

SEQ ID NO: 393 - DNA, 363 bp, Artificial Sequence
  Synthetic oligonucleotide
gaggtgcagctgttggagtctgggggaggcttggtacagcctggggggtccctgcgtctctcctgtgcagcctccggattcacctttgatgcttatcatatggggtgggtccgccaggctccagggaagggtctagagtgggtctcatttatttattcgcatggtacgcttacatactacgcagactccgtgaagggccggttcaccatctcccgcgacaattccaagaacacgctgtatctgcaaatgaacagcctgcgagccgaggataccgcggtatattactgtgcgaaaattgatattcggacgcatgatttggagtttgactactggggtcagggaaccctggtcaccgtctcgagc

SEQ ID NO: 394 - protein, 121 aa, Artificial Sequence
  Synthetic peptide
EVQLLESGGGLVQPGGSLRLSCAASGFTFDAYHMGWVRQAPGKGLEWVSFIYSHGTLTYYADSVKGRFTISRDNSKNTLYLQMNSLRAEDTAVYYCAKIDIRTHDLEFDYWGQGTLVTVSS

SEQ ID NO: 395 - DNA, 360 bp, Artificial Sequence
  Synthetic oligonucleotide
gaggtgcagctgttggagtctgggggaggcttggtacagcctggggggtccctgcgtctctcctgtgcagcctccggattcacctttagtaggtatgagatggcgtgggtccgccaggctccagggaagggtctagagtgggtctcacggatttcgtcttatggtttgcggacatactacgcagactccgtgaagggccggttcaccatctcccgcgacaattccaagaacacgctgtatctgcaaatgaacagcctgcgtgccgaggacaccgcggtatattactgtgcgaaagtgaataggtttaagacgcttccttttgactactggggtcagggaaccctggtcaccgtctcgagc

SEQ ID NO: 396 - protein, 120 aa, Artificial Sequence
  Synthetic peptide
EVQLLESGGGLVQPGGSLRLSCAASGFTFSRYEMAWVRQAPGKGLEWVSRISSYGLRTYYADSVKGRFTISRDNSKNTLYLQMNSLRAEDTAVYYCAKVNRFKTLPFDYWGQGTLVTVSS

SEQ ID NO: 397 - DNA, 360 bp, Artificial Sequence
  Synthetic oligonucleotide
gaggtgcagctgttggagtctgggggaggcttggtacagcctggggggtccctgcgtctctcctgtgcagcctccggattcacctttagttcgtatccgatgtattgggtccgccaggctccagggaagggtctagagtgggtctcatatattaatcctcagggtaataggacatactacgcagactccgtgaagggccggttcaccatctcccgcgacaattccaagaacacgctgtatctgcaaatgaacagcctgcgtgccgaggacaccgcggtatattactgtgcgaaacggaatcatcggactaaggttacttttgactactggggtcagggaaccctggtcaccgtctcgagc

SEQ ID NO: 398 - protein, 120 aa, Artificial Sequence
  Synthetic peptide
EVQLLESGGGLVQPGGSLRLSCAASGFTFSSYPMYWVRQAPGKGLEWVSYINPQGNRTYYADSVKGRFTISRDNSKNTLYLQMNSLRAEDTAVYYCAKRNHRTKVTFDYWGQGTLVTVSS

SEQ ID NO: 399 - DNA, 360 bp, Artificial Sequence
  Synthetic oligonucleotide
  misc_feature 336: n = A,T,C or G
gaggtgcagctgttggagtctgggggaggcttggtacagcctggggggtccctgcgtctctcctgtgcagcctccggattcacctttggtcgttatgggatggggtgggtccgccaggctccagggaagggtctagagtgggtctcaaggattactcgtagtggtcataagacatactacgcagactccgtgaagggccggttcaccatctcccgcgacaattccaagaacacgctgtatctgcaaatgaacagcctgcgtgccgaggacaccgcggtatattactgtgcgaaacatactcgttctgagtcttcgagttttgactactggggtcanggaaccctggtcaccgtctcgagc

SEQ ID NO: 400 - protein, 120 aa, Artificial Sequence
  Synthetic peptide
  VARIANT 112: Xaa = Any Amino Acid
EVQLLESGGGLVQPGGSLRLSCAASGFTFGRYGMGWVRQAPGKGLEWVSRITRSGHKTYYADSVKGRFTISRDNSKNTLYLQMNSLRAEDTAVYYCAKHTRSESSSFDYWGXGTLVTVSS

SEQ ID NO: 401 - DNA, 369 bp, Artificial Sequence
  Synthetic oligonucleotide
  misc_feature 184: n = A,T,C or G
gaggtgcagctgttggagtctggggggggcttggtacagcctggggggtccctgcgtctctcctgtgcagcctccggattcacctttcctaagtatgttatgagttgggtccgccaggctccagggaagggtctggagtgggtctcaacgattaatcaggcgggtttgaggacatactacgcanactccgtgaagggccggttcaccatctcccgcgacaattccaagaacacgctgtatctgcaaatgaacagcctgcgtgccgaggacaccgcggtatattactgtgtgaaacatgctactcgtttgatgtctggtggtcggcgttttgactactggggtcagggaaccctggtcaccgtctcgagc

SEQ ID NO: 402 - protein, 123 aa, Artificial Sequence
  Synthetic peptide
  VARIANT 62: Xaa = Any Amino Acid
EVQLLESGGGLVQPGGSLRLSCAASGFTFPKYVMSWVRQAPGKGLEWVSTINQAGLRTYYAXSVKGRFTISRDNSKNTLYLQMNSLRAEDTAVYYCVKHATRLMSGGRRFDYWGQGTLVTVSS

SEQ ID NO: 403 - DNA, 357 bp, Artificial Sequence
  Synthetic oligonucleotide
  misc_feature 302: n = A,T,C or G
gaggtgcagctgttggagtctgggggaggcttggtacagcccggggggtccctgcgtctctcctgtgcagcctccggattcacctttaggaatcggactatgggttgggtccgccaggctccagggaagggtctagagtgggtctcagatattgatgggcggggtgagaggacatactacgcagactccgtgaagggccggttcaccatctcccgcgacaattccaagaacacgctgtatctgcaaatgaacagcctgcgtgccgaggacaccgcggtatattactgtgcgaaactgactangggtcataataattttgactactggggtcagggaaccctggtcaccgtctcgagc

SEQ ID NO: 404 - protein, 119 aa, Artificial Sequence
  Synthetic peptide
  VARIANT 101: Xaa = Any Amino Acid
EVQLLESGGGLVQPGGSLRLSCAASGFTFRNRTMGWVRQAPGKGLEWVSDIDGRGERTYYADSVKGRFTISRDNSKNTLYLQMNSLRAEDTAVYYCAKLTXGHNNFDYWGQGTLVTVSS

SEQ ID NO: 405 - DNA, 360 bp, Artificial Sequence
  Synthetic oligonucleotide
gaggtgcagctgttggagtctgggggaggcttggtacagcctggggggtccctgcgtctctcctgtgcagcctccggattcacctttcgtgagagtcatatgatttgggcccgccaggctccagggaagggtctagagtgggtctcagctattgatcctgatggtatgaagacatactacgcagactccgtgaagggccggttcaccatctcccgcgacaattccaagaacacgctgtatctgcaaatgaacagcctgcgtgccgaggacaccgcggtatattactgtgcgaaattgcctatggatggtggtagtctgtttgactactggggtcagggaaccctggtcaccgtctcgagc

SEQ ID NO: 406 - protein, 120 aa, Artificial Sequence
  Synthetic peptide
EVQLLESGGGLVQPGGSLRLSCAASGFTFRESHMIWARQAPGKGLEWVSAIDPDGMKTYYADSVKGRFTISRDNSKNTLYLQMNSLRAEDTAVYYCAKLPMDGGSLFDYWGQGTLVTVSS

SEQ ID NO: 407 - DNA, 369 bp, Artificial Sequence
  Synthetic oligonucleotide
  misc_feature 312: n = A,T,C or G
gaggtgcagctgttggagtctgggggaggcttggtacagcctggggggtccctgcgtctctcctgtgcagcctccggattcacctttgatcggtatccgatgtcgtgggtccgccaggctccagggaagggtctcgagtgggtctcactgattaaggcggggggttcgcctacatactacgcagactccgtgaagggccggttcaccatctcccgcgacaattccaagaacacgctgtatctgcaaatgaacagcctgcgtgccgaggacaccgcggtatattactgtgcgaaacaggctgataatgttaanctgccgacgattaagtttgactactggggtcagggaaccctggtcaccgtctcgagc

SEQ ID NO: 408 - protein, 123 aa, Artificial Sequence
  Synthetic peptide
  VARIANT 104: Xaa = Any Amino Acid
EVQLLESGGGLVQPGGSLRLSCAASGFTFDRYPMSWVRQAPGKGLEWVSLIKAGGSPTYYADSVKGRFTISRDNSKNTLYLQMNSLRAEDTAVYYCAKQADNVXLPTIKFDYWGQGTLVTVSS

SEQ ID NO: 409 - DNA, 348 bp, Artificial Sequence
  Synthetic oligonucleotide
gaggtgcagctgttggagtctgggggaggcttggtacagcctggggggtccctgcgtctctcctgtgcagcctccggattcacctttgctcagtatcatatgcattgggcccgccaggctccagggaagggtctagagtgggtctcatctatttctgctaatggtctggctacatactacgcagactccgtgaagggccggttcaccatctcccgcgacaattccaagaacacgctgtatctgcaaatgaacagcctgcgtgccgaggacaccgcggtatattactgtgcgcaagcgggtacttcgtttgactactggggtcagggaaccctggtcaccgtctcgagc

SEQ ID NO: 410 - protein, 116 aa, Artificial Sequence
  Synthetic peptide
EVQLLESGGGLVQPGGSLRLSCAASGFTFAQYHMHWARQAPGKGLEWVSSISANGLATYYADSVKGRFTISRDNSKNTLYLQMNSLRAEDTAVYYCAQAGTSFDYWGQGTLVTVSS

SEQ ID NO: 411 - DNA, 354 bp, Artificial Sequence
  Synthetic oligonucleotide
gaggtgcagctgttggagtctgggggaggcttggtacagcctggggggtccctgcgtctctcctgtgcagcctccggattcacctttggttcggagagtatgcattgggcccgccaggctccagggaagggtctagagtgggtctcatctattgcggctgatggttctgcgacatactacgcagactccgtgaagggccggttcaccatctcccgcgacaattccaagaacacgctgtatctgcaaatgaacagcctgcgtgccgaggacaccgcggtatattactgtgcgaaacagagtctgcggccgtcttttgactactggggtcagggaaccctggtcaccgtctcgagc

SEQ ID NO: 412 - protein, 118 aa, Artificial Sequence
  Synthetic peptide
EVQLLESGGGLVQPGGSLRLSCAASGFTFGSESMHWARQAPGKGLEWVSSIAADGSATYYADSVKGRFTISRDNSKNTLYLQMNSLRAEDTAVYYCAKQSLRPSFDYWGQGTLVTVSS

SEQ ID NO: 413 - DNA, 369 bp, Artificial Sequence
  Synthetic oligonucleotide
gaggtgcagctgttggagtctgggggaggcttggtacagcctggggggtccctgcgtctctcctgtgcagcctccggattcacctttgaggattatggtatggggtgggtccgccaggctccaggaaagggtctagagtgggtctcaggtattgttcgtaatggttcgcagacatactacgcagactccgtgaagggccggttcaccatctcccgcgacaattccaagaacacgctgtatctgcaaatgaacagcctgcgtgccgaggataccgcggtatattactgtgcgaaacttcggagggggcggggtctgaatacgtttacgtttgactactggggtcagggaaccctggtcaccgtctcgagc

SEQ ID NO: 414 - protein, 123 aa, Artificial Sequence
  Synthetic peptide
EVQLLESGGGLVQPGGSLRLSCAASGFTFEDYGMGWVRQAPGKGLEWVSGIVRNGSQTYYADSVKGRFTISRDNSKNTLYLQMNSLRAEDTAVYYCAKLRRGRGLNTFTFDYWGQGTLVTVSS

SEQ ID NO: 415 - DNA, 366 bp, Artificial Sequence
  Synthetic oligonucleotide
gaggtgcagctgttggagtctgggggaggcttggtacagcctggggggtccctgcgtctctcctgtgcagcctctggattcacctttcggaagtataggatggcgtgggtccgccaggctccagggaagggtctagagtgggtctcaatgattgattctcttggtacgaagacatactacgcagactccgtgaagggccggttcaccatctcccgcgacaattccaagaacacgctgtatctgcaaatgaacagcctgcgtgccgaggataccgcggtatattactgtgcgaaacctcgtgtttttcaggggcagtttgagcggtttgactactggggtcagggaaccctggtcaccgtctcgagc

SEQ ID NO: 416 - protein, 122 aa, Artificial Sequence
  Synthetic peptide
EVQLLESGGGLVQPGGSLRLSCAASGFTFRKYRMAWVRQAPGKGLEWVSMIDSLGTKTYYADSVKGRFTISRDNSKNTLYLQMNSLRAEDTAVYYCAKPRVFQGQFERFDYWGQGTLVTVSS

SEQ ID NO: 417 - DNA, 369 bp, Artificial Sequence
  Synthetic oligonucleotide
gaggtgcagctgttggagtctgggggaggcttggtacagcctggggggtccctgcgtctctcctgtgcagcctccggattcacctttaggagttatgggatgatgtgggtccgccaggctccagggaagggtctagagtgggtctcagatattagtgctactggtctttggacatactacgcagactccgtgaagggccggttcaccatctcccgcgacaattccaagaacacgctgtatctgcaaatgaacagcctgcgtgccgaggacaccgcggtatattactgtgcgaaaatgaatacgtggtatcatggtgatcagtcggggtttgactactggggtcagggaaccctggtcaccgtctcgagc

SEQ ID NO: 418 - protein, 123 aa, Artificial Sequence
  Synthetic peptide
EVQLLESGGGLVQPGGSLRLSCAASGFTFRSYGMMWVRQAPGKGLEWVSDISATGLWTYYADSVKGRFTISRDNSKNTLYLQMNSLRAEDTAVYYCAKMNTWYHGDQSGFDYWGQGTLVTVSS

SEQ ID NO: 419 - DNA, 369 bp, Artificial Sequence
  Synthetic oligonucleotide
gaggtgcagctgttggagtctgggggaggcttggtacagcctggggggtccctgcgtctctcctgtgcagcctccggattcacctttagggattatcctatggcgtgggtccgccaggctccagggaagggtcttgagtggatctcagtgattagtcataagggtatgcggacatactacgcagactccgtgaagggccggttcaccatctcccgcgacaattccaagaacacgctgtatctgcaaatgaacagcctgcgtgccgaggataccgcggtatattactgtgcgaaacggccttctctggggagtaagacgaagggtcgttttgactactggggtcagggaaccctggtcaccgtctcgagc

SEQ ID NO: 420 - protein, 123 aa, Artificial Sequence
  Synthetic peptide
EVQLLESGGGLVQPGGSLRLSCAASGFTFRDYPMAWVRQAPGKGLEWISVISHKGMRTYYADSVKGRFTISRDNSKNTLYLQMNSLRAEDTAVYYCAKRPSLGSKTKGRFDYWGQGTLVTVSS

SEQ ID NO: 421 - DNA, 348 bp, Artificial Sequence
  Synthetic oligonucleotide
gaggtgcagctgttggagtctgggggaggcttggtacagcctggggggtccctgcgtctctcctgtgcagcctccggattcaccttttcgaagtatccgatgcattgggtccgccaggctccagggaagggtctagagtgggtctcatctattgattcgcgtggtggtggtacatactacgcagactccgtgaagggccggttcaccatctcccgcgacaattccaagaacacgctgtatctgcaaatgaacagcctgcgtgccgaggacaccgcggtatattactgtgcgaaaacggttgcgacgtttgactactggggtcagggaaccctggtcaccgtctcgagc

SEQ ID NO: 422 - protein, 116 aa, Artificial Sequence
  Synthetic peptide
EVQLLESGGGLVQPGGSLRLSCAASGFTFSKYPMHWVRQAPGKGLEWVSSIDSRGGGTYYADSVKGRFTISRDNSKNTLYLQMNSLRAEDTAVYYCAKTVATFDYWGQGTLVTVSS

SEQ ID NO: 423 - DNA, 348 bp, Artificial Sequence
  Synthetic oligonucleotide
gaggtgcagctgttggagtctgggggaggcttggtacagcctggggggtccctgcgtctctcctgtgcagcctccggattcacctttaggaattatccgatgcggtgggtccgccaggctccagggaagggtctagagtgggtctcaactatttcgaggggtggtcaggctacatactacgcagactccgtgaagggccggttcaccatctcccgcgacaattccaagaacacgctgtatctgcaaatgaacagcctgcgtgccgaggacaccgcggtatattactgtgcgaaaggtgctacttcgtttgactactggggtcagggaaccctggtcaccgtctcgagc

SEQ ID NO: 424 - protein, 116 aa, Artificial Sequence
  Synthetic peptide
EVQLLESGGGLVQPGGSLRLSCAASGFTFRNYPMRWVRQAPGKGLEWVSTISRGGQATYYADSVKGRFTISRDNSKNTLYLQMNSLRAEDTAVYYCAKGATSFDYWGQGTLVTVSS

SEQ ID NO: 425 - DNA, 348 bp, Artificial Sequence
  Synthetic oligonucleotide
gaggtgcagctgttggagtctgggggaggcttggtacagcctggggggtccctgcgtctctcctgtgcagcctccggattcacctttgaggatagtgggatgatttgggtccgccaggctccagggaagggtctagagtgggtctcagggattgcttctgagggtagtactacatactacgcagactccgtgaagggccggttcaccatctcccgcgacaattccaagaacacgctgtatctgcaaatgaacagcctgcgtgccgaggacaccgcggtatattactgtgcgaaatcgggtctgtcttttgactactggggtcagggaaccctggtcaccgtctcgagc

SEQ ID NO: 426 - protein, 116 aa, Artificial Sequence
  Synthetic peptide
EVQLLESGGGLVQPGGSLRLSCAASGFTFEDSGMIWVRQAPGKGLEWVSGIASEGSTTYYADSVKGRFTISRDNSKNTLYLQMNSLRAEDTAVYYCAKSGLSFDYWGQGTLVTVSS

SEQ ID NO: 427 - DNA, 372 bp, Artificial Sequence
  Synthetic oligonucleotide
gaggtgcagctgttggagtctgggggaggcttggtacagcctggggggtccctgcgtctctcctgtgcagcctccggattcacctttggggtttatgatatgcattgggtccgccaggctccagggaagggtctagagtgggtctcatctattagtcgtcatggtagtgctacatactacgcagactccgtgaagggccggttcaccatctcccgcgacaattccaagaacacgctgtatctgcaaatgaacagcctgcgtgccgaggacaccgcggtatattactgtgcgaaatatcctacgaagtggggtgcgggtactaggaggacgtttgactactggggtcagggaaccctggtcaccgtctcgagc

SEQ ID NO: 428 - protein, 124 aa, Artificial Sequence
  Synthetic peptide
EVQLLESGGGLVQPGGSLRLSCAASGFTFGVYDMHWVRQAPGKGLEWVSSISRHGSATYYADSVKGRFTISRDNSKNTLYLQMNSLRAEDTAVYYCAKYPTKWGAGTRRTFDYWGQGTLVTVSS

SEQ ID NO: 429 - DNA, 351 bp, Artificial Sequence
  Synthetic oligonucleotide
gaggtgcagctgttggagtctgggggaggcttggtacagcctggggggtccctgcgtctctcctgtgcagccaccggattcacctttcaggatcaggcgatgggttgggtccgccaggctccagggaagggtctagagtgggtctcagatattactccgactggtgattttacatactacgcaaactccgtgaagggccggttcaccatctcccgcgacaattccaagaacacgctgtatctgcaaatgaacagcctgcgtgccgaggacaccgcggtatattactgtgcgaaattggatggtgggcattttgactactggggtcagggaaccctggtcaccgtctcgagc

SEQ ID NO: 430 - protein, 117 aa, Artificial Sequence
  Synthetic peptide
EVQLLESGGGLVQPGGSLRLSCAATGFTFQDQAMGWVRQAPGKGLEWVSDITPTGDFTYYANSVKGRFTISRDNSKNTLYLQMNSLRAEDTAVYYCAKLDGGHFDYWGQGTLVTVSS

SEQ ID NO: 431 - DNA, 351 bp, Artificial Sequence
  Synthetic oligonucleotide
gaggtgcagctgttggagtctgggggaggcttggtacagcctggggggtccctgcgtctctcctgtgcagcctccggattcaccttttcttctttgccgatggggtgggtccgccaggctccagggaagggtctagagtgggtctcagatatttcggatgatggtgggcttacatactacgcagactccgtgaagggccggttcaccatctcccgcgacaattccaagaacacgctgtatctgcaaatgaacagcctgcgtgccgaggacaccgcggtatattactgtgcgaaacttgttagtggttcttttgactactggggtcagggaaccctggtcaccgtctcgagc

SEQ ID NO: 432 - protein, 117 aa, Artificial Sequence
  Synthetic peptide
EVQLLESGGGLVQPGGSLRLSCAASGFTFSSLPMGWVRQAPGKGLEWVSDISDDGGLTYYADSVKGRFTISRDNSKNTLYLQMNSLRAEDTAVYYCAKLVSGSFDYWGQGTLVTVSS

SEQ ID NO: 433 - DNA, 354 bp, Artificial Sequence
  Synthetic oligonucleotide
gaggtgcagctgttggagtctgggggaggcttggtacagcctggggggtccctgcgtctctcctgtgcagcctccggattcaccttttcgcagtatcagatgggttgggtccgccaggctccagggaagggtctagagtgggtctcagatatttctccgaggggtacgtatacatactacgcagactccgtgaagggccggttcaccatctcccgcgacaattccaagaacacgctgtatctgcaaatgaacagcctgcgtgccgaggacaccgcggtatattactgtgcgaaaatgaagttggggtcgtcttttgactactggggtcagggaaccctggtcaccgtctcgagc

SEQ ID NO: 434 - protein, 118 aa, Artificial Sequence
  Synthetic peptide
EVQLLESGGGLVQPGGSLRLSCAASGFTFSQYQMGWVRQAPGKGLEWVSDISPRGTYTYYADSVKGRFTISRDNSKNTLYLQMNSLRAEDTAVYYCAKMKLGSSFDYWGQGTLVTVSS

SEQ ID NO: 435 - DNA, 351 bp, Artificial Sequence
  Synthetic oligonucleotide
gaggtgcagctgttggagtctgggggaggcttggtacagcctggggggtccctgcgtctctcctgtgcagcctccggattcacctttcatcggtatactatgggttgggtccgccaggctccagggaagggtctagagtgggtctcagatatttctcctagtggtcgggagacatactacgcagactccgtgaagggccggttcaccatctcccgcgacaattccaagaacacgctgtatctgcaaatgaacagcctgcgtgccgaggataccgcggtatattactgtgcgaaattggagggtcgtacgtttgactactggggtcagggaaccctggtcaccgtctcgagc

SEQ ID NO: 436 - protein, 117 aa, Artificial Sequence
  Synthetic peptide
EVQLLESGGGLVQPGGSLRLSCAASGFTFHRYTMGWVRQAPGKGLEWVSDISPSGRETYYADSVKGRFTISRDNSKNTLYLQMNSLRAEDTAVYYCAKLEGRTFDYWGQGTLVTVSS

SEQ ID NO: 437 - DNA, 351 bp, Artificial Sequence
  Synthetic oligonucleotide
gaggtgcagctgttggagtctgggggaggcttggtacagcctggggggtccctgcgtctctcctgtgcagcctccggattcacctttggggatacggagatgagttgggtccgccaggctccagggaagggtctagagtgggtctcagatattgatgagatgggttttaagacatactacgcagactccgtgaagggccggttcaccatctcccgcgacaattccaagaacacgctgtatctgcaaatgaacagcctgcgtgccgaggacaccgcggtatattactgtgcgaaaggtattccggggcattttgactactggggtcagggaaccctggtcaccgtctcgagc

SEQ ID NO: 438 - protein, 117 aa, Artificial Sequence
  Synthetic peptide
EVQLLESGGGLVQPGGSLRLSCAASGFTFGDTEMSWVRQAPGKGLEWVSDIDEMGFKTYYADSVKGRFTISRDNSKNTLYLQMNSLRAEDTAVYYCAKGIPGHFDYWGQGTLVTVSS

SEQ ID NO: 439 - DNA, 348 bp, Artificial Sequence
  Synthetic oligonucleotide
gaggtgcagctgttggagtctgggggaggcttggtacagcctggggggtccctgcgtctctcctgtgcagcctccggattcacctttgaggatacgcgtatgcattgggtccgccaggctccagggaagggtctagagtgggtctcatctattgggcctcatggttttgttacatactacgcagactccgtgaagggccggttcaccatctcccgcgacaattccaagaacacgctgtatctgcaaatgaacagcctgcgtgccgaggacaccgcggtatattactgtgcgaaagcgaagatgtcgtttgactactggggtcagggaaccctggtcaccgtctcgagc

SEQ ID NO: 440 - protein, 116 aa, Artificial Sequence
  Synthetic peptide
EVQLLESGGGLVQPGGSLRLSCAASGFTFEDTRMHWVRQAPGKGLEWVSSIGPHGFVTYYADSVKGRFTISRDNSKNTLYLQMNSLRAEDTAVYYCAKAKMSFDYWGQGTLVTVSS

SEQ ID NO: 441 - DNA, 348 bp, Artificial Sequence
  Synthetic oligonucleotide
gaggtgcagctgttggagtctgggggaggcttggtacagcctggggggtccctgcgtctctcctgtgcagcctccggattcacctttaagcaggagcctatgcattgggtccgccaggctccagggaagggtctggagtgggtctcaagtattggtaatcagggtcgggagacatactacgcagactccgtgaagggccggttcaccatctcccgcgacaattccaagaacacgctgtatctgcaaatgaacagcctgcgtgccgaggacaccgcggtatattactgtgcgaaagatgtggcttcttttgactactggggtcagggaaccctggtcaccgtctcgagc

SEQ ID NO: 442 - protein, 116 aa, Artificial Sequence
  Synthetic peptide
EVQLLESGGGLVQPGGSLRLSCAASGFTFKQEPMHWVRQAPGKGLEWVSSIGNQGRETYYADSVKGRFTISRDNSKNTLYLQMNSLRAEDTAVYYCAKDVASFDYWGQGTLVTVSS

SEQ ID NO: 443 - DNA, 348 bp, Artificial Sequence
  Synthetic oligonucleotide
gaggtgcagctgttggagtctgggggaggcttggtacagcctggggggtccctgcgtctctcctgtgcagcctccggattcacctttgagtcttataatatggcttgggtccgccaggctccagggaagggtctagagtgggtctcatggattacggggaatggtgggcatacatactacgcagactccgtgaagggccggttcaccatctcccgcgacaattccaagaacacgctgtatctgcaaatgaacagcctgcgtgccgaggacaccgcggtatattactgtgcggaagggagtgggaattttgactactggggtcagggaaccctggtcaccgtctcgagc

SEQ ID NO: 444 - protein, 116 aa, Artificial Sequence
  Synthetic peptide
EVQLLESGGGLVQPGGSLRLSCAASGFTFESYNMAWVRQAPGKGLEWVSWITGNGGHTYYADSVKGRFTISRDNSKNTLYLQMNSLRAEDTAVYYCAEGSGNFDYWGQGTLVTVSS

SEQ ID NO: 445 - DNA, 348 bp, Artificial Sequence
  Synthetic oligonucleotide
gaggtgcagctgttggagtctgggggaggcttggtacagcctggggggtccctgcgtctctcctgtgcagcctccggattcacctttgctaatggggagatgggttgggtccgccaggctccagggaagggtctagagtgggtctcagcgattaagggtgagggtggtaagacatactacgcagactccgtgaagggccggttcaccatctcccgcgacaattccaagaacacgctgtatctgcaaatgaacagcctgcgtgccgaggataccgcggtatattactgtgcgaaattggatccgaattttgactactggggtcagggaaccctggtcaccgtctcgagc

SEQ ID NO: 446 - protein, 116 aa, Artificial Sequence
  Synthetic peptide
EVQLLESGGGLVQPGGSLRLSCAASGFTFANGEMGWVRQAPGKGLEWVSAIKGEGGKTYYADSVKGRFTISRDNSKNTLYLQMNSLRAEDTAVYYCAKLDPNFDYWGQGTLVTVSS

SEQ ID NO: 447 - DNA, 351 bp, Artificial Sequence
  Synthetic oligonucleotide
gaggtgcagctgttggagtctgggggaggcttggtacagcctggggggtccctgcgtctctcctgtgcagcctccggattcacctttcatccttatgctatggcttgggtccgccaggctccagggaagggtctagagtgggtctcatggattagttctactggtaaggctacatactacgcagactccgtgaagggccggttcaccatctcccgcgacaattccaagaacacgctgtatctgcaaatgaacagcctgcgtgccgaggataccgcggtatattactgtgcgcaagcggagggttctcattttgactactggggtcagggaaccctggtcaccgtctcgagc

SEQ ID NO: 448 - protein, 117 aa, Artificial Sequence
  Synthetic peptide
EVQLLESGGGLVQPGGSLRLSCAASGFTFHPYAMAWVRQAPGKGLEWVSWISSTGKATYYADSVKGRFTISRDNSKNTLYLQMNSLRAEDTAVYYCAQAEGSHFDYWGQGTLVTVSS

SEQ ID NO: 449 - DNA, 348 bp, Artificial Sequence
  Synthetic oligonucleotide
gaggtgcagctgttggagtctgggggaggcttggtacagcctggggggtccctgcgtctctcctgtgcagcctccggattcaccttttctcagtatccgatgcattgggtccgccaggctccagggaagggtctggagtgggtctcaacgattggtaataatggtgatgtgacatactacgcagactccgtgaagggccggttcaccatctcccgcgacaattccaagaacacgctgtatctgcaaatgaacagcctgcgtgccgaggacaccgcggtatattactgtgcgaaaacggttcaggattttgactactggggtcagggaaccctggtcaccgtctcgagc

SEQ ID NO: 450 - protein, 116 aa, Artificial Sequence
  Synthetic peptide
EVQLLESGGGLVQPGGSLRLSCAASGFTFSQYPMHWVRQAPGKGLEWVSTIGNNGDVTYYADSVKGRFTISRDNSKNTLYLQMNSLRAEDTAVYYCAKTVQDFDYWGQGTLVTVSS

SEQ ID NO: 451 - DNA, 354 bp, Artificial Sequence
  Synthetic oligonucleotide
gaggtgcagctgttggagtctgggggaggcttggtacagcctggggggtccctgcgtctctcctgtgcagcctccggattcacctttgagcagggttatatgggttgggtccgccaggctccagggaagggtctagagtgggtctcatttattgttggggatggttattctacatactacgcagactccgtgaagggccggttcaccatctcccgcgacaattccaagaacacgctgtatctgcaaatgaacagcctgcgtgccgaggacaccgcggtatattactgtgcgaaagggttgagtactgagcggtttgactactggggtcagggaaccctggtcaccgtctcgagc

SEQ ID NO: 452 - protein, 118 aa, Artificial Sequence
  Synthetic peptide
EVQLLESGGGLVQPGGSLRLSCAASGFTFEQGYMGWVRQAPGKGLEWVSFIVGDGYSTYYADSVKGRFTISRDNSKNTLYLQMNSLRAEDTAVYYCAKGLSTERFDYWGQGTLVTVSS

SEQ ID NO: 453 - DNA, 366 bp, Artificial Sequence
  Synthetic oligonucleotide
gaggtgcagctgttggagtctgggggaggcttggtacagcctggggggtccctgcgtctctcctgtgcagcctccggattcacctttaaggagtattggatgggttgggtccgccaggctccagggaaaggtctagagtgggtctcagatatttctccgacgggtttgagtacatactacgcagactccgtgaagggccggttcaccatctcccgcgacaattccaagaacacgctgtatctgcaaatgaacagcctgcgtgccgaggacaccgcggtatattactgtgcgaaacttccgcctgctagtacggagtcttctacttttgactactggggtcagggaaccctggtcaccgtctcgagc

SEQ ID NO: 454 - protein, 122 aa, Artificial Sequence
  Synthetic peptide
EVQLLESGGGLVQPGGSLRLSCAASGFTFKEYWMGWVRQAPGKGLEWVSDISPTGLSTYYADSVKGRFTISRDNSKNTLYLQMNSLRAEDTAVYYCAKLPPASTESSTFDYWGQGTLVTVSS

SEQ ID NO: 455 - DNA, 354 bp, Artificial Sequence; identical to SEQ ID NO: 255
  Synthetic oligonucleotide

SEQ ID NO: 456 - protein, 118 aa, Artificial Sequence; identical to SEQ ID NO: 256
  Synthetic peptide

SEQ ID NO: 457 - DNA, 348 bp, Artificial Sequence
  Synthetic oligonucleotide
gaggtgcagctgttggagtctgggggaggcttggtacagcctggggggtccctgcgtctctcctgtgcagcctccggattcacctttggtatgtatcctatgagttgggtccgccaggctccagggaagggtctagagtgggtctcatggattagtcggactggtgcgagtacatactacgcagactccgtgaagggccggttcaccatctcccgcgacaattccaagaacacgctgtatctgcaaatgaacagcctgcgtgccgaggacaccgcggtatattactgtgcggaagggtcggggaattttgactactggggtcagggaaccctggtcaccgtctcgagc

SEQ ID NO: 458 - protein, 116 aa, Artificial Sequence
  Synthetic peptide
EVQLLESGGGLVQPGGSLRLSCAASGFTFGMYPMSWVRQAPGKGLEWVSWISRTGASTYYADSVKGRFTISRDNSKNTLYLQMNSLRAEDTAVYYCAEGSGNFDYWGQGTLVTVSS

SEQ ID NO: 459 - DNA, 351 bp, Artificial Sequence
  Synthetic oligonucleotide
gaggtgcagctgttggagtctgggggaggcttggtacagcctggggggtccctgcgtctctcctgtgcagcctccggattcacctttactaatctggatatggggtgggtccgccaggctccagggaagggtctggagtgggtctcagatattgattctgggggtactactacatactacgcagactccgtgaagggccggttcaccatctcccgcgacaattccaagaacacgctgtatctgcaaatgaacagcctgcgtgccgaggacaccgcggtatattactgtgcgaaattgtcgtctggtaagtttgaactactggggtcagggaccctggtcaccgtctcgagc

SEQ ID NO: 460 - protein, 117 aa, Artificial Sequence
  Synthetic peptide
EVQLLESGGGLVQPGGSLRLSCAASGFTFTNLDMGWVRQAPGKGLEWVSDIDSGGTTTYYADSVKGRFTISRDNSKNTLYLQMNSLRAEDTAVYYCAKLSSGKFELLGSGTLVTVSS

SEQ ID NO: 461 - DNA, 348 bp, Artificial Sequence
  Synthetic oligonucleotide
gaggtgcagctgttggagtctgggggaggcttggtacagcctggggggtccctgcgtctctcctgtgcagcctccggattcacctttccgacttatcatatgagttgggcccgccaggctccagggaagggtctagagtgggtctcatctatttctgctagtggtagtgcgacatactacgcagactccgtgaagggccggttcaccatctcccgcgacaattccaagaacacgctgtatctgcaaatgaacagcctgcgtgccgaggacaccgcggtatattactgtgcgaaaagtgcgactagttttgactactggggtcagggaaccctggtcaccgtctcgagc

SEQ ID NO: 462 - protein, 116 aa, Artificial Sequence
  Synthetic peptide
EVQLLESGGGLVQPGGSLRLSCAASGFTFPTYHMSWARQAPGKGLEWVSSISASGSATYYADSVKGRFTISRDNSKNTLYLQMNSLRAEDTAVYYCAKSATSFDYWGQGTLVTVSS

SEQ ID NO: 463 - DNA, 348 bp, Artificial Sequence
  Synthetic oligonucleotide
gaggtgcagctgttggagtctgggggaggcttggtacagcctggggggtccctgcgtctctcctgtgcagcctccggattcacctttaagcagtatcctatggcgtgggtccgccaggctccagggaagggtctagagtgggtctcatggattacttcgtcgggtgatcggacatactacgcagactccgtgaagggccggttcaccatctcccgcgacaattccaagaacacgctgtatctgcaaatgaacagcctgcgtgccgaggacaccgcggtatattactgtgcggaaggggttgggaattttgactactggggtcagggaaccctggtcaccgtctcgagc

SEQ ID NO: 464 - protein, 116 aa, Artificial Sequence
  Synthetic peptide
EVQLLESGGGLVQPGGSLRLSCAASGFTFKQYPMAWVRQAPGKGLEWVSWITSSGDRTYYADSVKGRFTISRDNSKNTLYLQMNSLRAEDTAVYYCAEGVGNFDYWGQGTLVTVSS

SEQ ID NO: 465 - DNA, 348 bp, Artificial Sequence
  Synthetic oligonucleotide
gaggtgcggctgttggagtctgggggaggcttggtacagcctggggggtccctgcgtctctcctgtgcagcctccggattcacctttagtaagtatagtatgcattgggtccgccaggctccagggaagggtctagagtgggtctcaagtatttcggctactggtggttcgacatactacgcagactccgtgaagggccggttcaccatctcccgcgacaattccaagaacacgctgtatctgcaaatgaacagcctgcgtgccgaggacaccgcggtatattactgtgcgaaagatgtgactcattttgactactggggtcagggaaccctggtcaccgtctcgagc

SEQ ID NO: 466 - protein, 116 aa, Artificial Sequence
  Synthetic peptide
EVRLLESGGGLVQPGGSLRLSCAASGFTFSKYSMHWVRQAPGKGLEWVSSISATGGSTYYADSVKGRFTISRDNSKNTLYLQMNSLRAEDTAVYYCAKDVTHFDYWGQGTLVTVSS

SEQ ID NO: 467 - DNA, 366 bp, Artificial Sequence
  Synthetic oligonucleotide
gaggtgcagctgttggagtctgggggaggcttggtacagcctggggggtccctgcgtctctcctgtgcagcctccggattcacctttgctaagtatcctatgatgtgggtccgccaggctccagggaagggtctagagtgggtctcagatattgatgctaagggtattatgacatactacgcagactccgtgaagggccggttcaccatctcccgcgacaattccaggaacacgctgtatctgcaaatgaacagcctgcgtgccgaggacaccgcggtatattactgtgcgaaaatgtcggctcctgttcagccgaatgctagttttgactactggggtcagggaaccctggtcaccgtctcgagc

SEQ ID NO: 468 - protein, 122 aa, Artificial Sequence
  Synthetic peptide
EVQLLESGGGLVQPGGSLRLSCAASGFTFAKYPMMWVRQAPGKGLEWVSDIDAKGIMTYYADSVKGRFTISRDNSRNTLYLQMNSLRAEDTAVYYCAKMSAPVQPNASFDYWGQGTLVTVSS

SEQ ID NO: 469 - DNA, 348 bp, Artificial Sequence
  Synthetic oligonucleotide
gaggtgcagctgttggagtctgggggaggcttggtacagcctggggggtccctgcgtctctcctgtgcagcctccggattcaccttttctacgtatccgatgcattgggcccgccaggctccagggaagggtctagagtgggtctcatcgattagtccgagtggtgattctacatactacgcagactccgtgaagggccggttcaccatctcccgcgacaattccaagaacacgctgtatctgcaaatgaacagcctgcgtgccgaggacaccgcggtatattactgtgcgaaaaatgcgctgaggtttgactactggggtcagggaaccctggtcaccgtctcgagc

SEQ ID NO: 470 - protein, 116 aa, Artificial Sequence
  Synthetic peptide
EVQLLESGGGLVQPGGSLRLSCAASGFTFSTYPMHWARQAPGKGLEWVSSISPSGDSTYYADSVKGRFTISRDNSKNTLYLQMNSLRAEDTAVYYCAKNALRFDYWGQGTLVTVSS

SEQ ID NO: 471 - DNA, 354 bp, Artificial Sequence
  Synthetic oligonucleotide
gaggtgcagctgttggagtctgggggaggcttggtacagcctggggggtccctgcgtctctcctgtgcagcctccggattcacctttcatgataagactatgatgtgggtccgccaggctccagggaagggtctagagtgggtctcagatattagtcctaatggtgcgtttacatactacgcagactccgtgaagggccggttcaccatctcccgcgacaattccaagaacacgctgtatctgcaaatgaacagcctgcgtgccgaggacaccgcggtctattactgtgcgaaacttggtcgtactaagcattttgactactggggtcagggaaccctggtcaccgtctcgagc

SEQ ID NO: 472 - protein, 118 aa, Artificial Sequence
  Synthetic peptide
EVQLLESGGGLVQPGGSLRLSCAASGFTFHDKTMMWVRQAPGKGLEWVSDISPNGAFTYYADSVKGRFTISRDNSKNTLYLQMNSLRAEDTAVYYCAKLGRTKHFDYWGQGTLVTVSS

SEQ ID NO: 473 - DNA, 354 bp, Artificial Sequence
  Synthetic oligonucleotide
gaggtgcagctgttggagtctgggggaggcttggtacagcctggggggtccctgcgtctctcctgtgcagcctccggattcacctttgctaaggagtctatgttttgggtccgccaggctccagggaagggtctagagtgggtctcagctattagtggtagtggtggtagcacatactacgcagactccgtgaagggccggttcaccatctcccgcgacaattccaagaacacgctgtatctgcaaatgaacagcctgcgtgccgaggacaccgcggtatattactgtgcgaaacgtaatcttgttgatgattttgactactggggtcagggaaccctggtcaccgtctcgagc

SEQ ID NO: 474 - protein, 118 aa, Artificial Sequence
  Synthetic peptide
EVQLLESGGGLVQPGGSLRLSCAASGFTFAKESMFWVRQAPGKGLEWVSAISGSGGSTYYADSVKGRFTISRDNSKNTLYLQMNSLRAEDTAVYYCAKRNLVDDFDYWGQGTLVTVSS

SEQ ID NO: 475 - DNA, 354 bp, Artificial Sequence
  Synthetic oligonucleotide
gaggtgcagctgttggagtctgggggaggcttggtacagcctggggggtccctgcgtctctcctgtgcagcctccggattcacctttccgagtgagaatatgatttgggtccgccaggctccagggaagggtctagagtgggtctcaggtattaatgggccgggtgagtctacatactacgcagactccgtgaagggccggttcaccatctcccgcgacaattccaagaacacgctgtatctgcaaatgaacagcctgcgtgccgaggataccgcggtatattactgtgcgaaattgggtgttgctgaggattttgactactggggtcagggaaccctggtcaccgtctcgagc

SEQ ID NO: 476 - protein, 118 aa, Artificial Sequence
  Synthetic peptide
EVQLLESGGGLVQPGGSLRLSCAASGFTFPSENMIWVRQAPGKGLEWVSGINGPGESTYYADSVKGRFTISRDNSKNTLYLQMNSLRAEDTAVYYCAKLGVAEDFDYWGQGTLVTVSS

SEQ ID NO: 477 - DNA, 348 bp, Artificial Sequence
  Synthetic oligonucleotide
gaggtgcagctgttggagtctgggggaggcttggtacagcctggggggtccctgcgtctctcctgtgcagcctccggattcacctttccgcgttatactatgcattgggtccgccaggctccagggaagggtcttgagtgggtctcatcgatttctgctgcgggtaaggctacatactacgcagactccgtgaagggccggttcaccatctcccgcgacaattccaagaacacgctgtatctgcaaatgaacggcctgcgtgccgaggacaccgcggtatattactgtgcgaaaaatgttcggcagtttgactactggggtcagggaaccctggtcaccgtctcgagc

SEQ ID NO: 478 - protein, 116 aa, Artificial Sequence
  Synthetic peptide
EVQLLESGGGLVQPGGSLRLSCAASGFTFPRYTMHWVRQAPGKGLEWVSSISAAGKATYYADSVKGRFTISRDNSKNTLYLQMNGLRAEDTAVYYCAKNVRQFDYWGQGTLVTVSS

SEQ ID NO: 479 - DNA, 348 bp, Artificial Sequence
  Synthetic oligonucleotide
gaggtgcagctgttggagtctgggggaggcttggtacagcctggggggtccctgcgtctctcctgtgcagcctccggattcacctttaaggattatgagatgggttgggtccgccaggctccagggaagggtctagagtgggtctcagatattcatccgactggtaatcctacatactacgcagactccgtgaagggccggttcaccatctcccgcgacaattccaagaacacgctgtatctgcaaatgaacagcctgcgtgccgaggataccgcggtatattactgtgtgaaagttgcgcatggttttgactactggggtcagggaaccctggtcaccgtctcgagc

SEQ ID NO: 480 - protein, 116 aa, Artificial Sequence
  Synthetic peptide
EVQLLESGGGLVQPGGSLRLSCAASGFTFKDYEMGWVRQAPGKGLEWVSDIHPTGNPTYYADSVKGRFTISRDNSKNTLYLQMNSLRAEDTAVYYCVKVAHGFDYWGQGTLVTVSS

SEQ ID NO: 481 - DNA, 351 bp, Artificial Sequence
  Synthetic oligonucleotide
gaggtgcagctgttggagtctgggggaggcttggtacagcctggggggtccctgcgtctctcctgtgcagcctccggattcacctttgagggtactctgatgggttgggtccgccaggctccagggaagggtctagagtgggtctcagatattgatgcgagtggtagtcatacatactacgcagactccgtgaagggccggttcaccatctcccgcgacaattccaagaacacgctgtatctgcaaatgaacagcctgcgtgccgaggacaccgcggtatattactgtgcgaaatggaaggggcatctttttgactactggggtcagggaaccctggtcaccgtctcgagc

SEQ ID NO: 482 - protein, 117 aa, Artificial Sequence
  Synthetic peptide
EVQLLESGGGLVQPGGSLRLSCAASGFTFEGTLMGWVRQAPGKGLEWVSDIDASGSHTYYADSVKGRFTISRDNSKNTLYLQMNSLRAEDTAVYYCAKWKGHLFDYWGQGTLVTVSS

SEQ ID NO: 483 - DNA, 348 bp, Artificial Sequence
  Synthetic oligonucleotide
gaggtgcagctgttggagtctgggggaggcttggtacagcctggggggtccctgcgtctctcctgtgcagcctccggattcacctttggtaattatgtgatgcattgggtccgccaggctccagggaagggtctagagtgggtctcatcgattagtccgtctggttttagtacatactacgcagactccgtgaagggccggttcaccatctcccgcgacaattccaagaacacgctgtatctgcaaatgaacagcctgcgtgccgaggacaccgcggtatattactgtgcgaaagatattcagtcgtttgactactggggtcagggaaccctggtcaccgtctcgagc

SEQ ID NO: 484 - protein, 116 aa, Artificial Sequence
  Synthetic peptide
EVQLLESGGGLVQPGGSLRLSCAASGFTFGNYVMHWVRQAPGKGLEWVSSISPSGFSTYYADSVKGRFTISRDNSKNTLYLQMNSLRAEDTAVYYCAKDIQSFDYWGQGTLVTVSS

SEQ ID NO: 485 - DNA, 348 bp, Artificial Sequence
  Synthetic oligonucleotide
gaggtgcagctgttggagtctgggggaggcttggtacagcctggggggtccctgcgtctctcctgtgcagcctccggattcacctttcatgataagactatgatgtgggtccgccaggctccagggaagggtctagagtgggtctcagatattagtccttctggtcgttctacatactacgcagactccgtgaagggccggttcaccatctcccgcgacaattccaagaacacgctgtatctgcaaatgaacagcctgcgtgccgaggacaccgcggtatattactgtgcggaatctgcgaggtcttttgactactggggtcagggaaccctggtcaccgtctcgagc

SEQ ID NO: 486 - protein, 116 aa, Artificial Sequence
  Synthetic peptide
EVQLLESGGGLVQPGGSLRLSCAASGFTFHDKTMMWVRQAPGKGLEWVSDISPSGRSTYYADSVKGRFTISRDNSKNTLYLQMNSLRAEDTAVYYCAESARSFDYWGQGTLVTVSS

SEQ ID NO: 487 - DNA, 369 bp, Artificial Sequence
  Synthetic oligonucleotide
gaggtgcagctgttggagtctgggggaggctcggtacagcctggggggtccctgcgtctctcctgtgcagcctccggattcacctttagtgtttatccgatgtcgtgggtccgccaggctccagggaagggtctagagtgggtctcagatatttcgccgtggggtaaggcgacatactacgcagactccgtgaagggccggttcaccatctcccgcgacaattccaagaacacgctgtatctgcaaatgaacagcctgcgtgccgaggacaccgcggtatattactgtgcgaaagggttgcctccgaaggattttggtgatgttgagtttgactactggggtcagggaaccctggtcaccgtctcgagc

SEQ ID NO: 488 - protein, 123 aa, Artificial Sequence
  Synthetic peptide
EVQLLESGGGSVQPGGSLRLSCAASGFTFSVYPMSWVRQAPGKGLEWVSDISPWGKATYYADSVKGRFTISRDNSKNTLYLQMNSLRAEDTAVYYCAKGLPPKDFGDVEFDYWGQGTLVTVSS

SEQ ID NO: 489 - DNA, 351 bp, Artificial Sequence
  Synthetic oligonucleotide
gaggtgcagctgttggagtctgggggaggcttggtacagcctggggggtccctgcgtctctcctgtgcagcctccggattcacctttgggaatgagcatatggcttgggtccgccaggctccagggaagggtctggagtgggtctcatggattggggctagtggtgttaatacatactacgcagactccgtgaagggccggttcaccatctcccgcgacaattccaagaacacgctgtatctgcaaatgaacagcctgcgtgccgaggacaccgcggtatattactgtgcgcaagggcgtggtaagaggtttgactactggggtcagggaaccctggtcaccgtctcgagc

SEQ ID NO: 490 - protein, 117 aa, Artificial Sequence
  Synthetic peptide
EVQLLESGGGLVQPGGSLRLSCAASGFTFGNEHMAWVRQAPGKGLEWVSWIGASGVNTYYADSVKGRFTISRDNSKNTLYLQMNSLRAEDTAVYYCAQGRGKRFDYWGQGTLVTVSS

SEQ ID NO: 491 - DNA, 351 bp, Artificial Sequence
  Synthetic oligonucleotide
gaggtgcagctgttggagtctgggggaggcttggtacagcctggggggtccctgcgtctctcctgtgcagcctccggattcacctttggtgatgagactatggggtgggtccgccaggctccagggaagggtctagagtgggtctcagatatttctagtaatggtgaggagacatactacgcagactccgtgaagggccggttcaccatctcccgcgacaattccaagaacacgctgtatctgcaaatgaacagcctgcgtgccgaggacaccggggtatattactgtgcgaaattgcagcgtgggacttttgactactggggtcagggaaccctggtcaccgtctcgagc

SEQ ID NO: 492 - protein, 117 aa, Artificial Sequence
  Synthetic peptide
EVQLLESGGGLVQPGGSLRLSCAASGFTFGDETMGWVRQAPGKGLEWVSDISSNGEETYYADSVKGRFTISRDNSKNTLYLQMNSLRAEDTGVYYCAKLQRGTFDYWGQGTLVTVSS

SEQ ID NO: 493 - DNA, 369 bp, Artificial Sequence
  Synthetic oligonucleotide
gaggtgcagctgttggagtctgggggaggcttggtacagcctggggggtccctgcgtctctcctgtgcagcctccggattcacctttgagtcttatatgatggggtgggtccgccaggctccagggaagggtctagagtgggtctcagatattagtccgggtggttcggcgacatactacgcagactccgtgaagggccggttcaccatctcccgcgacaattccaagaacacgctgtatctgcaaatgaacagcctgcgtgccgaggacaccgcggtatattactgtgcgaaatgggcgcgtactaatatggcttcgaagtattattttgactactggggtcagggaaccctggtcaccgtctcgagc

SEQ ID NO: 494 - protein, 123 aa, Artificial Sequence
  Synthetic peptide
EVQLLESGGGLVQPGGSLRLSCAASGFTFESYMMGWVRQAPGKGLEWVSDISPGGSATYYADSVKGRFTISRDNSKNTLYLQMNSLRAEDTAVYYCAKWARTNMASKYYFDYWGQGTLVTVSS

SEQ ID NO: 495 - DNA, 348 bp, Artificial Sequence
  Synthetic oligonucleotide
gaggtgcagctgttggagtctgggggaggcttggtacagcctggggggtccctgcgtctctcctgtgcagcctccggattcacctttgggaattatgagatggtgtgggtccgccaggctccagggaagggtctggagtgggtctcagctattgatggggagggttctcatacatactacgcagactccgtgaagggccggttcaccatctcccgcgacaattccaagaacacgctgtatctgcaaatgaacagcctgcgtgccgaggacaccgcggtatattactgtgcgaaaatgcctctggattttgactactggggtcagggaaccctggtcaccgtcccgagc

SEQ ID NO: 496 - protein, 116 aa, Artificial Sequence
  Synthetic peptide
EVQLLESGGGLVQPGGSLRLSCAASGFTFGNYEMVWVRQAPGKGLEWVSAIDGEGSHTYYADSVKGRFTISRDNSKNTLYLQMNSLRAEDTAVYYCAKMPLDFDYWGQGTLVTVPS

SEQ ID NO: 497 - DNA, 348 bp, Artificial Sequence
  Synthetic oligonucleotide
gaggtgcagctgttggagtctgggggaggcttggtacagcctggggggtccctgcgtctctcctgtgcagcctccggattcacctttaggcattatactatgggttgggcccgccaggctccagggaagggtctagagtgggtctcatttattgatcggcatggtgagagtacatactacgcagactccgtgaagggccggttcaccatctcccgcgacaattccaagaacacgctgtatctgcaaatgaacagcctgcgtgccgaggacaccgcggtatattactgtgcgaaaaatggggatgattttgactactggggtcagggaaccctggtcaccgtctcgagc

SEQ ID NO: 498 - protein, 116 aa, Artificial Sequence
  Synthetic peptide
EVQLLESGGGLVQPGGSLRLSCAASGFTFRHYTMGWARQAPGKGLEWVSFIDRHGESTYYADSVKGRFTISRDNSKNTLYLQMNSLRAEDTAVYYCAKNGDDFDYWGQGTLVTVSS

SEQ ID NO: 499 - DNA, 351 bp, Artificial Sequence
  Synthetic oligonucleotide
gaggtgcagctgttggagtctgggggaggcttggtacagcctggggggtccctgcgtctctcctgtgcagcctccggattcacctttagggggacgccgatgggttgggtccgccaggctccagggaagggtctagagtgggtctcagatatttcgccggcgggtgatattacatactacgcagactccgtgaagggccggttcaccatctcccgcgacaattccaagaacacgctgtatctgcaaatgaacagcctgcgtgccgaggacaccgcggtatattactgtgcgaaatttgatgtttctccttttgactactggggtcagggaaccctggtcaccgtctcgagc

SEQ ID NO: 500 - protein, 117 aa, Artificial Sequence
  Synthetic peptide
EVQLLESGGGLVQPGGSLRLSCAASGFTFRGTPMGWVRQAPGKGLEWVSDISPAGDITYYADSVKGRFTISRDNSKNTLYLQMNSLRAEDTAVYYCAKFDVSPFDYWGQGTLVTVSS

SEQ ID NO: 501 - DNA, 348 bp, Artificial Sequence
  Synthetic oligonucleotide
gaggtgcagctgttggagtctgggggaggcttggtacagcctggggggtccctgcgtctctcctgtgcagcctccggattcacctttgggcagtatccgatgcattgggtccgccaggctccagggaagggtctggagtgggtctcatcgatttcgtctcagggtaagtctacatactacgcagactccgtgaagggccggttcaccatctcccgcgacaattccaagaacacgctgtatctgcaaatgaacagcctgcgtgccgaggacaccgcggtatattactgtgcgaaagatacgtcgagttttgactactggggtcagggaaccctggtcaccgtctcgagc

SEQ ID NO: 502 - protein, 116 aa, Artificial Sequence
  Synthetic peptide
EVQLLESGGGLVQPGGSLRLSCAASGFTFGQYPMHWVRQAPGKGLEWVSSISSQGKSTYYADSVKGRFTISRDNSKNTLYLQMNSLRAEDTAVYYCAKDTSSFDYWGQGTLVTVSS

SEQ ID NO: 503 - DNA, 348 bp, Artificial Sequence
  Synthetic oligonucleotide
gaggtgcagctgttggagtctgggggaggcttggtacagcctggggggtccctgcgtctctcctgtgcagcctccggattcacctttggtaggtatccgatgcattgggtccgccaggctccagggaagggtctagagtgggtctcaactatttctgatattggtaaggagacatactacgcagactccgtgaagggccggttcaccatctcccgcgacaattccaagaacacgctgtatctgcaaatgaacagcctgcgtgccgaggacaccgcggtatattactgtgcgaaagatgtgcagtcttttgactactggggtcagggaaccctggtcaccgtctcgagc

SEQ ID NO: 504 - protein, 116 aa, Artificial Sequence
  Synthetic peptide
EVQLLESGGGLVQPGGSLRLSCAASGFTFGRYPMHWVRQAPGKGLEWVSTISDIGKETYYADSVKGRFTISRDNSKNTLYLQMNSLRAEDTAVYYCAKDVQSFDYWGQGTLVTVSS

SEQ ID NO: 505 - DNA, 351 bp, Artificial Sequence
  Synthetic oligonucleotide
gaggtgcagctgttggagcctgggggaggcttggtacagcctggggggtccctgcgtctctcctgtgcagcctccggattcacctttgagtcgggggagatggggtgggcccgccaggctccagggaagggtctagagtgggtctcagctattagtggtagtggtggtagcacatactacgcagactccgtgaagggccggttcaccatctcccgcgacaattccaagaacacgctgtatctgcaaatgaacagcctgcgtgccgaggacaccgcggtatattactgtgcgaaactgtcgcaggcgggttttgactactggggtcagggaaccctggtcaccgtctcgagc

SEQ ID NO: 506 - protein, 117 aa, Artificial Sequence
  Synthetic peptide
EVQLLEPGGGLVQPGGSLRLSCAASGFTFESGEMGWARQAPGKGLEWVSAISGSGGSTYYADSVKGRFTISRDNSKNTLYLQMNSLRAEDTAVYYCAKLSQAGFDYWGQGTLVTVSS

SEQ ID NO: 507 - DNA, 348 bp, Artificial Sequence
  Synthetic oligonucleotide
gaggtgcagctgttggagtctgggggaggcttggtacagcctggggggtccctgcgtctctcctgtgcagcctccggattcaccttttcgtcgtatactatgcattgggtccgccaggctccagggaagggtctagagtgggtctcatcgatttctgataatggttcgagtacatactacgcagactccgtgaagggccggttcaccatctcccgcgacaattccaagaacacgctgtatctgcaaatgaacagcctgcgtgccgaggacaccgcggtatattactgtgcgaaagatgttaggacttttgactactggggtcagggaaccctggtcaccgtctcgagc

SEQ ID NO: 508 - protein, 116 aa, Artificial Sequence
  Synthetic peptide
EVQLLESGGGLVQPGGSLRLSCAASGFTFSSYTMHWVRQAPGKGLEWVSSISDNGSSTYYADSVKGRFTISRDNSKNTLYLQMNSLRAEDTAVYYCAKDVRTFDYWGQGTLVTVSS

SEQ ID NO: 509 - DNA, 348 bp, Artificial Sequence
  Synthetic oligonucleotide
gaggtgcagctgttggagtctgggggaggcttggtacagcctggggggtccctgcgtctctcctgtgcagcctccggattcacctttaataggtatccgatgagttgggtccgccaggctccagggaagggtctagagtgggtctcatggatttcggctgatggtacgactacatactacgcagactccgtgaagggccggttcaccatctcccgcgacaattccaagaacacgctgtatctgcaaatgaacagcctgcgtgccgaggacaccgcggtatattactgtgcggaaggtactgagtcgtttgactactggggtcagggaaccctggtcaccgtctcgagc

SEQ ID NO: 510 - protein, 116 aa, Artificial Sequence
  Synthetic peptide
EVQLLESGGGLVQPGGSLRLSCAASGFTFNRYPMSWVRQAPGKGLEWVSWISADGTTTYYADSVKGRFTISRDNSKNTLYLQMNSLRAEDTAVYYCAEGTESFDYWGQGTLVTVSS

SEQ ID NO: 511 - DNA, 351 bp, Artificial Sequence
  Synthetic oligonucleotide
gaggtgcagctgttggagtctgggggaggcttggtacagcctggggggtccctgcgtctctcctgtgcagcctccggattcaccttttcgaattatacgatggggtgggtccgccaggctccagggaagggtctagagtgggtctcagatatttcgtctacgggtgatgctacatactacgcagactccgtgaagggccggttcaccatctcccgcgacaattccaagaacacgctgtatctgcaaatgaacagcctgcgtgccgaggataccgcggtatattactgtgcgaaatttggtatgtctagttttgactactggggtcagggaaccctggtcaccgtctcgagc

SEQ ID NO: 512 - protein, 117 aa, Artificial Sequence
  Synthetic peptide
EVQLLESGGGLVQPGGSLRLSCAASGFTFSNYTMGWVRQAPGKGLEWVSDISSTGDATYYADSVKGRFTISRDNSKNTLYLQMNSLRAEDTAVYYCAKFGMSSFDYWGQGTLVTVSS

SEQ ID NO: 513 - DNA, 348 bp, Artificial Sequence
  Synthetic oligonucleotide
gaggtgcagctgttggagtctgggggaggcttggtacagcctggggggtccctgcgtctctcctgtgcagcctccggattcacctttgggacgtatgtgatgcattgggtccgccaggctccagggaagggtctagagtgggtctcatctatttctgcgtcgggtactggtacatactacgcagactccgtgaagggccggttcaccatctcccgcgacaattccaagaacacgctgtatctgcaaatgaacagcctgcgtgccgaggacaccgcggtatattactgtgcgaaagatgtggagagttttgactactggggtcagggaaccctggtcaccgtctcgagc

SEQ ID NO: 514 - protein, 116 aa, Artificial Sequence
  Synthetic peptide
EVQLLESGGGLVQPGGSLRLSCAASGFTFGTYVMHWVRQAPGKGLEWVSSISASGTGTYYADSVKGRFTISRDNSKNTLYLQMNSLRAEDTAVYYCAKDVESFDYWGQGTLVTVSS

SEQ ID NO: 515 - DNA, 363 bp, Artificial Sequence
  Synthetic oligonucleotide
gaggtgcagctgttggagtctgggggaggcttggtacagcctggggggtccctgcgtctctcctgtgcagcctccggattcgcctttgataagtatcctatgatgtgggtccgccaggctccagggaagggtctagagtgggtctcagatattagtcctctgggtacttatacatactacgcagactccgtgaagggccggttcaccatctcccgcgacaattccaagaacacgctgtatctgcaaatgaacagcctgcgtgccgaggacaccgcggtatattactgtgcgaaaggtacgggtaatgctacgggtgcttcttttgactactggggtcagggaaccctggtcaccgtctcgagc

SEQ ID NO: 516 - protein, 121 aa, Artificial Sequence
  Synthetic peptide
EVQLLESGGGLVQPGGSLRLSCAASGFAFDKYPMMWVRQAPGKGLEWVSDISPLGTYTYYADSVKGRFTISRDNSKNTLYLQMNSLRAEDTAVYYCAKGTGNATGASFDYWGQGTLVTVSS

SEQ ID NO: 517 - DNA, 357 bp, Artificial Sequence
  Synthetic oligonucleotide
gaggtgcagctgttggagtctgggggaggcttggtacagcctggggggtctctgcgtctctcctgtgcagcctccggattcacctttcctcagcatgatatgatgtgggtccgccaggctccagggaagggtctagagtgggtctcagatattgatcctagtggtgtgactacgtactacgcagactccgtgaagggccggttcaccatctcccgcgacaattccaagaacacgctgtatctgcaaatgaacagcctgcgtgccgaggacaccgcggtatattactgtgcgaaaatgcgtcttgggggggggctttttgactactggggtcagggaaccctggtcaccgtctcgagc

SEQ ID NO: 518 - protein, 119 aa, Artificial Sequence
  Synthetic peptide
EVQLLESGGGLVQPGGSLRLSCAASGFTFPQHDMMWVRQAPGKGLEWVSDIDPSGVTTYYADSVKGRFTISRDNSKNTLYLQMNSLRAEDTAVYYCAKMRLGGGLFDYWGQGTLVTVSS

SEQ ID NO: 519 - DNA, 363 bp, Artificial Sequence
  Synthetic oligonucleotide
gaggtgcagctgttggagtctgggggaggcttggtacagcctggggggtccctgcgtctctcctgtgcagcctccggattcacctttaatgatacgtggatgtattgggtccgccaggctccagggaagggtctagagtgggtctcagatattagtgattctggtgatgttacatactacgcagactccgtgaagggccggttcaccatctcccgcgacaattccaagaacacgctgtatctgcaaatgaacagcctgcgtgccgaggataccgcggtatattactgtgcgaaagggtcgagtgctaagcagcctattgggtttgactactggggtcagggaaccctggtcaccgtctcgagc

SEQ ID NO: 520 - protein, 121 aa, Artificial Sequence
  Synthetic peptide
EVQLLESGGGLVQPGGSLRLSCAASGFTFNDTWMYWVRQAPGKGLEWVSDISDSGDVTYYADSVKGRFTISRDNSKNTLYLQMNSLRAEDTAVYYCAKGSSAKQPIGFDYWGQGTLVTVSS

SEQ ID NO: 521 - DNA, 357 bp, Artificial Sequence
  Synthetic oligonucleotide
gaggtgcagctgttggagtctgggggaggcttggtacagcctggggggtccctgcgtctctcctgtgcagcctccggattcacctttcatgataagactatgatgtgggtccgccaggctccagggaagggtctagagtgggtctcagatattagtcctaatggtgcgtttacatactacgcagactccgtgaagggccggttcaccatctcccgcgacaattccaagaacacgctgtatctgcaaatgaacagcctgcgtgccgaggacaccgcggtatattactgtgcgaaactttctgatgagtcgtctcgttttgactactggggtcagggaaccctggtcaccgtctcgagc

SEQ ID NO: 522 - protein, 119 aa, Artificial Sequence
  Synthetic peptide
EVQLLESGGGLVQPGGSLRLSCAASGFTFHDKTMMWVRQAPGKGLEWVSDISPNGAFTYYADSVKGRFTISRDNSKNTLYLQMNSLRAEDTAVYYCAKLSDESSRFDYWGQGTLVTVSS

SEQ ID NO: 523 - DNA, 363 bp, Artificial Sequence
  Synthetic oligonucleotide
gaggtgcagctgctggagtctgggggaggcttggtacagcctggggggtccctgcgtctctcctgtgcagcctccggattcacctttgcgaattattctatggcgtgggtccgccaggctccagggaagggtctagagtgggtctcaaggattagtgctcctggttctcggacatactacgcagactccgtgaagggccggttcaccatctcccgcgacaattccaagaacacgctgtatctgcaaatgaacagcctgcgtgccgaggataccgcggtatattactgtgcgaaaatggcgaattcttctacgagttctcggtttgactactggggtcagggaaccctggtcaccgtctcgagc

SEQ ID NO: 524 - protein, 121 aa, Artificial Sequence
  Synthetic peptide
EVQLLESGGGLVQPGGSLRLSCAASGFTFANYSMAWVRQAPGKGLEWVSRISAPGSRTYYADSVKGRFTISRDNSKNTLYLQMNSLRAEDTAVYYCAKMANSSTSSRFDYWGQGTLVTVSS

SEQ ID NO: 525 - DNA, 357 bp, Artificial Sequence
  Synthetic oligonucleotide
gaggtgcagctgttggagtctgggggaggcttggtacagcctggggggtccctgcgtctctcctgtgcagcctccggattcacctttcctgtgtatcatatggggtgggtccgccaggctccagggaagggtctggagtgggtctcatggattggtgtggatggtgatgggacatactacgcagactccgtgaagggccggttcaccatctcccgcgacaattccaagaacacgctgtatctgcaaatgaacagcctgcgtgccgaggacaccgcggtatattactgtgcgaaagctagtacggatatgagtatgtttgactactggggtcagggaaccctggtcaccgtctcgagc

SEQ ID NO: 526 - protein, 119 aa, Artificial Sequence
  Synthetic peptide
EVQLLESGGGLVQPGGSLRLSCAASGFTFPVYHMGWVRQAPGKGLEWVSWIGVDGDGTYYADSVKGRFTISRDNSKNTLYLQMNSLRAEDTAVYYCAKASTDMSMFDYWGQGTLVTVSS

SEQ ID NO: 527 - DNA, 357 bp, Artificial Sequence
  Synthetic oligonucleotide
gaggtgcagctgttggagtctgggggaggcttggtacagcctggggggtccctgcgtctctcctgtgcagcctccggattcacctttcatgataagactatgatgtgggtccgccaggctccagggaagggtctagagtgggtctcagatattagtcctaatggtgcgtttacatactacgcagactccgtgaagggccggttcaccatctcccgcgacaattccaagaacacgctgtatctgcaaatgaacagcctgcgtgccgaggacaccgcggtatattactgtgcgaaactggcgcatgattctcgttcgtttgactactggggtcagggaaccctggtcaccgtctcgagc

SEQ ID NO: 528 - protein, 119 aa, Artificial Sequence
  Synthetic oligonucleotide
EVQLLESGGGLVQPGGSLRLSCAASGFTFHDKTMMWVRQAPGKGLEWVSDISPNGAFTYYADSVKGRFTISRDNSKNTLYLQMNSLRAEDTAVYYCAKLAHDSRSFDYWGQGTLVTVSS

SEQ ID NO: 529 - DNA, 357 bp, Artificial Sequence
  Synthetic oligonucleotide
gaggtgcagctgttggagtctgggggaggcttggtacagcctggggggtccctgcgtctctcctgtgcagcctccggattcacctttgataatggttcgatgggttgggtccgccaggctccagggaaaggtctagagtgggtctcagctattaagggtccgggtatgcgtacatactacgcagactccgtgaagggccggttcaccatctcccgcgacaattccaagaacacgctgtatctgcaaatgaacagcctgcgtgccgaggacaccgcggtatattactgtgcgaaacttgataataggtatccgcagtttgactactggggtcagggaaccctggtcaccgtctcgagc

SEQ ID NO: 530 - protein, 119 aa, Artificial Sequence
  Synthetic peptide
EVQLLESGGGLVQPGGSLRLSCAASGFTFDNGSMGWVRQAPGKGLEWVSAIKGPGMRTYYADSVKGRFTISRDNSKNTLYLQMNSLRAEDTAVYYCAKLDNRYPQFDYWGQGTLVTVSS

SEQ ID NO: 531 - DNA, 357 bp, Artificial Sequence
  Synthetic oligonucleotide
gaggtgcagctgttggagtctgggggaggcttggtacagcctggggggtccctgcgtctctcctgtgcagcctccggattcacctttcctgcttatactatgcattgggtccgccaggctccagggaagggtctagagtgggtctcatcgattagtgcggcgggttctagtacatactacgcagactccgtgaagggccggttcaccatctcccgcgacaattccaagaacacgctgtatctgcaaatgaacagcctgcgtgccgaggataccgcggtatattactgtgcgaaacatactcatgagcagacgaagtttgactactggggtcagggaaccctggtcaccgtctcgagc

SEQ ID NO: 532 - protein, 119 aa, Artificial Sequence
  Synthetic peptide
EVQLLESGGGLVQPGGSLRLSCAASGFTFPAYTMHWVRQAPGKGLEWVSSISAAGSSTYYADSVKGRFTISRDNSKNTLYLQMNSLRAEDTAVYYCAKHTHEQTKFDYWGQGTLVTVSS

SEQ ID NO: 533 - DNA, 348 bp, Artificial Sequence
  Synthetic oligonucleotide
gaggtgcagctgttggagtctgggggaggcttggtacagcctggggggtccctgcgtctctcctgtgcagcctccggattcaccttttgggagtatccgatgatgtgggtccgccaggctccagggaagggtctggagtgggtctcagctattagtggtagtggtggtagcacacactacgcagactccgtgaagggccggttcaccatctcccgcgacaattccaagaacacgctgtatctgcaaatgaacagcctgcgtgccgaggacaccgcggtatattactgtgcgaaagatgtggattcgtttgactactggggtcagggaaccctggtcaccgtctcgagc

SEQ ID NO: 534 - protein, 116 aa, Artificial Sequence
  Synthetic peptide
EVQLLESGGGLVQPGGSLRLSCAASGFTFWEYPMMWVRQAPGKGLEWVSAISGSGGSTHYADSVKGRFTISRDNSKNTLYLQMNSLRAEDTAVYYCAKDVDSFDYWGQGTLVTVSS

SEQ ID NO: 535 - DNA, 363 bp, Artificial Sequence
  Synthetic oligonucleotide
gaggtgcagctgttggagtctgggggaggcttggtacagcctggggggtccctgcgtctctcctgtgcagcctccggattcacctttgagcgttatatgatgggttgggtccgccaggctccagggaagggtctagagtgggtctcagatattgatcattcgggtaagattacatactacgcagactccgtgaagggccggttcaccatctcccgcgacaattccaagaacacgctgtatctgcaaatgaacagcctgcgtgccgaggataccgcggtatattactgtgcgaaatggaggaatgcgattggtcagaatgagtttgactactggggtcagggaaccctggtcaccgtctcgagc

SEQ ID NO: 536 - protein, 121 aa, Artificial Sequence
  Synthetic peptide
EVQLLESGGGLVQPGGSLRLSCAASGFTFERYMMGWVRQAPGKGLEWVSDIDHSGKITYYADSVKGRFTISRDNSKNTLYLQMNSLRAEDTAVYYCAKWRNAIGQNEFDYWGQGTLVTVSS

SEQ ID NO: 537 - DNA, 348 bp, Artificial Sequence
  Synthetic oligonucleotide
gaggtgcagctgttggagtctgggggaggcttggtacagcctggggggtccctgcgtctctcctgtgcagcctccggattcaccttttcgaggtataatatgcattgggtccgccaggctccagggaagggtctagagtgggtctcatcgattaatccgctgggtagtatgacatactacgcagactccgtgaagggccggttcaccatctcccgcgacaattccaagaacacgctgtatctgcaaatgaacagcctgcgtgccgaggacaccgcggtatattactgtgcgaaagatatttctacgtttgactactggggtcagggaaccctggtcaccgtctcgagc

SEQ ID NO: 538 - protein, 116 aa, Artificial Sequence
  Synthetic peptide
EVQLLESGGGLVQPGGSLRLSCAASGFTFSRYNMHWVRQAPGKGLEWVSSINPLGSMTYYADSVKGRFTISRDNSKNTLYLQMNSLRAEDTAVYYCAKDISTFDYWGQGTLVTVSS

SEQ ID NO: 539 - DNA, 357 bp, Artificial Sequence
  Synthetic oligonucleotide
gaggtgcagctgttggagtctgggggaggcttggtacagcctggggggtccctgcgtctctcctgtgcagcctccggattcacctttgctcatgagacgatggggtgggtccgccaggctccagggaagggtctagagtgggtctcagatattgggggggcgggtgcgcctacatactacgcagactccgtgaagggccggttcaccatctcccgcgacaattccaagaacacgctgtatctgcaaatgaacagcctgcgtgccgaggacaccgcggtatattactgtgcgaaatttgatttggctaagcatggttttgactactggggtcagggaaccctggtcaccgtctcgagc

SEQ ID NO: 540 - protein, 119 aa, Artificial Sequence
  Synthetic peptide
EVQLLESGGGLVQPGGSLRLSCAASGFTFAHETMGWVRQAPGKGLEWVSDIGGAGAPTYYADSVKGRFTISRDNSKNTLYLQMNSLRAEDTAVYYCAKFDLAKHGFDYWGQGTLVTVSS

SEQ ID NO: 541 - DNA, 357 bp, Artificial Sequence
  Synthetic oligonucleotide
gaggtgcagctgttggagtctgggggaggcttggtacagcctggggggtccctgcgtctctcctgtgcagcctccggattcacctttgagcataatgagatgggttgggtccgccaggctccagggaagggtctggagtgggtctcaattattgatcctagtggtcatcatacatactacgcagactccgtgaagggccggttcaccatctcccgcgacaattccaagaacacgctgtatctgcaaatgaacagcctgcgtgccgaggacaccgcggtatattactgtgcggaatcttctaggcttaattcggattttgactactggggtcagggaaccctggtcaccgtctcgagc

SEQ ID NO: 542 - protein, 119 aa, Artificial Sequence
  Synthetic peptide
EVQLLESGGGLVQPGGSLRLSCAASGFTFEHNEMGWVRQAPGKGLEWVSIIDPSGHHTYYADSVKGRFTISRDNSKNTLYLQMNSLRAEDTAVYYCAESSRLNSDFDYWGQGTLVTVSS

SEQ ID NO: 543 - DNA, 348 bp, Artificial Sequence
  Synthetic oligonucleotide
gaggtgcagctgttggagtctgggggaggcttggtacagcctggggggtccctgcgtctctcctgtgcagcctccggattcacctttccggagtatcctatgtattgggtccgccaggctccagggaagggtctagagtgggtctcagcgatttctccgactggtctgagtacatactacgcagactccgtgaagggccggttcaccatctcccgcgacaattccaagaacacgctgtatctgcaaatgaacagcctgcgtgccgaggacaccgcggtatattactgtgcgaaagatgcggataattttgactactggggtcagggaaccctggtcaccgtctcgagc

SEQ ID NO: 544 - protein, 116 aa, Artificial Sequence
  Synthetic peptide
EVQLLESGGGLVQPGGSLRLSCAASGFTFPEYPMYWVRQAPGKGLEWVSAISPTGLSTYYADSVKGRFTISRDNSKNTLYLQMNSLRAEDTAVYYCAKDADNFDYWGQGTLVTVSS

SEQ ID NO: 545 - DNA, 360 bp, Artificial Sequence
  Synthetic oligonucleotide
gaggtgcagctgttggagtctgggggaggcttggtacagcctggggggtccctgcgtctctcctgtgcagcctccggattcacctttaagccgtatgcgatgcattgggtccgccaggctccagggaagggtctagagtgggtctcatctattagttctactggtctgagtacatactacgcagactccgtgaagggccggttcaccatctcccgcgacaattccaagaacacgctgtatctgcaaatgaacagcctgcgtgccgaggacaccgcggtatattactgtgcgaaagatgcttctcgttttaggcagccttttgactactggggtcagggaaccctggtcaccgtctcgagc

SEQ ID NO: 546 - protein, 120 aa, Artificial Sequence
  Synthetic peptide
EVQLLESGGGLVQPGGSLRLSCAASGFTFKPYAMHWVRQAPGKGLEWVSSISSTGLSTYYADSVKGRFTISRDNSKNTLYLQMNSLRAEDTAVYYCAKDASRFRQPFDYWGQGTLVTVSS

SEQ ID NO: 547 - DNA, 360 bp, Artificial Sequence
  Synthetic oligonucleotide
gaggtgcagctgttggagtctgggggaggcttggtacagcctggggggtccctgcgtctctcctgtgcagcctccggattcacctttaagccgtatgcgatgcattgggtccgccaggctccagggaagggtctagagtgggtctcatctattagttctactggtctgagtacatactacgcagactccgtgaagggccggttcaccatctcccgcgacaattccaagaacacgctgtatctgcaaatgaacagcctgcgtgccgaggacaccgcggtatattactgtgcgaaaaatgcttctcgttttaggcagccttttgactactggggtcagggaaccctggtcaccgtctcgagc

SEQ ID NO: 548 - protein, 120 aa, Artificial Sequence
  Synthetic peptide
EVQLLESGGGLVQPGGSLRLSCAASGFTFKPYAMHWVRQAPGKGLEWVSSISSTGLSTYYADSVKGRFTISRDNSKNTLYLQMNSLRAEDTAVYYCAKNASRFRQPFDYWGQGTLVTVSS

SEQ ID NO: 549 - DNA, 360 bp, Artificial Sequence
  Synthetic oligonucleotide
gaggtgcagctgttggagtctgggggaggcttggtacagcctggggggtccctgcgtctctcctgtgcagcctccggattcacctttaagccgtatgcgatgcattgggtccgccaggatccagggaagggtctagagtgggtctcatctattagttctactggtctgagtacatactacgcagactccgtgaagggccggttcaccatctcccgcgacaattccaagaacacgctgtatctgcaaatgaacagcctgcgtgccgaggacaccgcggtatattactgtgcgaaagatgcttctcgttttaggcagccttttgactactggggtcagggaaccctggtcaccgtctcgagc

SEQ ID NO: 550 - protein, 120 aa, Artificial Sequence
  Synthetic peptide
EVQLLESGGGLVQPGGSLRLSCAASGFTFKPYAMHWVRQDPGKGLEWVSSISSTGLSTYYADSVKGRFTISRDNSKNTLYLQMNSLRAEDTAVYYCAKDASRFRQPFDYWGQGTLVTVSS

SEQ ID NO: 551 - DNA, 324 bp, Artificial Sequence
  Synthetic oligonucleotide
gacatccagatgacccagtctccatcctccctgtctgcatctgtaggagaccgtgtcaccattacttgccgggcaagtcaggcgattgggcggtggttattgtggtatcagcagaaaccagggaaagcccctaagctcctgatctatgctgcgtcccgtttgcaaagtggggtcccatcacgtttcagtggcagtggatctgggacagatttcactctcaccatcagcagtctgcaacctgaagattttgctacgtactactgtcaacaggcgtatagtctgcctccgacgtttggccaagggaccaaggtggaaatcaaacgg

SEQ ID NO: 552 - protein, 108 aa, Artificial Sequence
  Synthetic peptide
DIQMTQSPSSLSASVGDRVTITCRASQAIGRWLLWYQQKPGKAPKLLIYAASRLQSGVPSRFSGSGSGTDFTLTISSLQPEDFATYYCQQAYSLPPTFGQGTKVEIKR

SEQ ID NO: 553 - DNA, 324 bp, Artificial Sequence
  Synthetic oligonucleotide
gacatccagatgacccagtctccatcctccctgtctgcatctgtaggagaccgtgtcaccatcacttgccgggcaagtatgagtattgatgagtctttatggtggtaccagcagaaaccagggaaagcccctaagctcctgatccggggtgggtccgggttgcaaagtggggtcccatcacgtttcagtggcagtggatctgggacagatttcactctcaccatcagcagtctgcaacctgaagattttgctacgtactactgtgggcaggcggcgcggcgtccttatacgttcggccaagggaccaaggtggaaatcaaacgg

SEQ ID NO: 554 - protein, 108 aa, Artificial Sequence
  Synthetic peptide
DIQMTQSPSSLSASVGDRVTITCRASMSIDESLWWYQQKPGKAPKLLIRGGSGLQSGVPSRFSGSGSGTDFTLTISSLQPEDFATYYCGQAARRPYTFGQGTKVEIKR

SEQ ID NO: 555 - DNA, 324 bp, Artificial Sequence
  Synthetic oligonucleotide
gacatccagatgacccagtctccatcctccctgtctgcatctgtaggagaccgtgtcaccatcacttgccgggcaagtcattatattgggaatgagttatggtggtaccagcagaaaccagggaaagcccctaagctcctgatccggcgtgggtccgggttgcaaagtggggtcccatcacgtttcagtggcagtggatctgggacagatttcactctcaccatcagcagtctgcaacctgaagattttgctacgtactactgtggtcaggcgaggcatcggccttatacgttcggccaagggaccagggtggaaatcaaacgg

SEQ ID NO: 556 - protein, 108 aa, Artificial Sequence
  Synthetic peptide
DIQMTQSPSSLSASVGDRVTITCRASHYIGNELWWYQQKPGKAPKLLIRRGSGLQSGVPSRFSGSGSGTDFTLTISSLQPEDFATYYCGQARHRPYTFGQGTRVEIKR

SEQ ID NO: 557 - DNA, 324 bp, Artificial Sequence
  Synthetic oligonucleotide
gacatccagatgacccagtctccatcctccctgtctgcatctgtaggagaccgtgtcaccatcacttgtcgggcaagttctaatattgggaggtctttagtgtggtaccagcagaaaccagggaaagcccctaagctcctgatcgcgggtggttcccttttgcaaagtggggtcccatcacgtttcagtggcagtggatctgggacagatttcactctcaccatcagcagtctgcaacctgaagattttgctacgtactactgtgggcagtatgctgaggagccttttacgttcggccaagggaccagggtggaaatcaaacgg

SEQ ID NO: 558 - protein, 108 aa, Artificial Sequence
  Synthetic peptide
DIQMTQSPSSLSASVGDRVTITCRASSNIGRSLVWYQQKPGKAPKLLIAGGSLLQSGVPSRFSGSGSGTDFTLTISSLQPEDFATYYCGQYAEEPFTFGQGTRVEIKR

SEQ ID NO: 559 - DNA, 324 bp, Artificial Sequence
  Synthetic oligonucleotide
gacatccagatgacccagtctccatcctccctgtctgcatctgtaggagaccgtgtcaccatcacttgccgggcaagtgtgaagattggggagcgtttatggtggtaccagcagaaaccaggggaagcccctaagctcctgatccgggatgcgtccttgttgcaaagtggggtcccatcacgtttcagtggcagtgggtctgggacagatttcactctcaccatcagcagtctgcaacctgaagattttgctacgtactactgtggtcagtcgtggatgcgtccttatacgttcggccaagggaccaaggtggaaatcaaacgg

SEQ ID NO: 560 - protein, 108 aa, Artificial Sequence
  Synthetic peptide
DIQMTQSPSSLSASVGDRVTITCRASVKIGERLWWYQQKPGEAPKLLIRDASLLQSGVPSRFSGSGSGTDFTLTISSLQPEDFATYYCGQSWMRPYTFGQGTKVEIKR

SEQ ID NO: 561 - DNA, 324 bp, Artificial Sequence
  Synthetic oligonucleotide
gacatccagatgacccagtctccatcctccctgtctgcatctgtaggagaccgtgtcaccatcacttgccgggcaagtagttatattggtggtgagttatggtggtaccagcagaaaccagggaaagcccctaagctcctgatctcgggtacttccgggttgcaaagtggggtcccatcacgtttcagtggcagtggatctgggacagatttcactctcaccatcagcagtctgcaacctgaagattttgctacgtactactgtgggcaggctgctaagcgtccttttacgttcggccaagggaccaaggtggaaatcaaacgg

SEQ ID NO: 562 - protein, 108 aa, Artificial Sequence
  Synthetic peptide
DIQMTQSPSSLSASVGDRVTITCRASSYIGGELWWYQQKPGKAPKLLISGTSGLQSGVPSRFSGSGSGTDFTLTISSLQPEDFATYYCGQAAKRPFTFGQGTKVEIKR

SEQ ID NO: 563 - DNA, 324 bp, Artificial Sequence
  Synthetic oligonucleotide
gacatccagatgacccagtctccatcctccctgtctgcatctgtaggagaccgtgtcaccatcacttgccgggcaagtagttggattaatagtgatttagtttggtaccagcagaaaccaggggaagcccctaagctcctgatcgctgggggttccttgttgcaaagtggggtcccatcacgtttcagtggcagtggatctgggacagatttcactctcaccatcagcagtctgcaacctgaagattttgctacgtactactgtggtcagtatcttgaggagccttatacgttcggccaagggaccaaggtggaagtcaaacgg

SEQ ID NO: 564 - protein, 108 aa, Artificial Sequence
  Synthetic peptide
DIQMTQSPSSLSASVGDRVTITCRASSWINSDLVWYQQKPGEAPKLLIAGGSLLQSGVPSRFSGSGSGTDFTLTISSLQPEDFATYYCGQYLEEPYTFGQGTKVEVKR

SEQ ID NO: 565 - DNA, 324 bp, Artificial Sequence
  Synthetic oligonucleotide
gacatccagatgacccagtctccatcctccctgtctgcatctgtaggagaccgtgtcaccatcacttgccgggcaagtctgcctattgtgaggagtttagtgtggtaccagcagaaaccagggaaagcccctaagctcctgatcgggggggggtccgtgttgcaaagtggggtcccatcacgtttcagtggcagtggatctgggacagatttcactctcaccatcagcagtctgcaacctgaaaattttgctacgtactactgtgggcagtatcgtatgtggccttatacgttcggccaagggaccaaggtggaaatcaaacgg

SEQ ID NO: 566 - protein, 108 aa, Artificial Sequence
  Synthetic peptide
DIQMTQSPSSLSASVGDRVTITCRASLPIVRSLVWYQQKPGKAPKLLIGGGSVLQSGVPSRFSGSGSGTDFTLTISSLQPENFATYYCGQYRMWPYTFGQGTKVEIKR

SEQ ID NO: 567 - DNA, 324 bp, Artificial Sequence
  Synthetic oligonucleotide
gacatccagatgacccagtctccatcctccctgtctgcatctgtaggagaccgtgtcaccatcacttgccgggcaagtggggatattggtcatgcgttatggtggtaccagcagaaaccagggaaagcccctaagctcctgatccgtgggggttccgcgttgcaaagtggggtcccatcacgtttcagtggcagtggatctgggacagatttcactctcaccatcagcagtctgcaacctgaagattttgctacgtactactgtgggcagtcgcatgtgcggccttttacgttcggccaagggaccaaggtggaaatcaaacgg

SEQ ID NO: 568 - protein, 108 aa, Artificial Sequence
  Synthetic peptide
DIQMTQSPSSLSASVGDRVTITCRASGDIGHALWWYQQKPGKAPKLLIRGGSALQSGVPSRFSGSGSGTDFTLTISSLQPEDFATYYCGQSHVRPFTFGQGTKVEIKR

SEQ ID NO: 569 - DNA, 324 bp, Artificial Sequence
  Synthetic oligonucleotide
gacatccagatgacccagtctccatcctccctgtctgcatctgtaggagaccgtgtcaccatcacttgccgggcaagtcaggcgattatggataatttatggtggtaccagcagaaaccagggaaagcccctaagctcctgatcagggggggttccgggttgcaaagtggggtcccatcacgtttcagtggcagtggatctgggacagatttcactctcaccatcagcagtctgcaacctgaagattttgctacgtactactgtgggcagtcttctatgcggccttttacgttcggccaagggaccaaggtggaaatcaaacgg

SEQ ID NO: 570 - protein, 108 aa, Artificial Sequence
  Synthetic peptide
DIQMTQSPSSLSASVGDRVTITCRASQAIMDNLWWYQQKPGKAPKLLIRGGSGLQSGVPSRFSGSGSGTDFTLTISSLQPEDFATYYCGQSSMRPFTFGQGTKVEIKR

SEQ ID NO: 571 - DNA, 276 bp, Artificial Sequence
  Synthetic oligonucleotide
gacatccagatgacccagtctccatccttcctgtctgcatctgtaggagaccgtgtcaccatcacttgccgggcaagtaagtttattggttcggagttaggttggttccagcagaaaccagggaaagcccctaagctcctgatcggtgtgacttccgtgttgcaacgtggggtcccatcacgtttcagtggcagtggatctgggacagatttcactctcaccatcagcagtctgcaacctacgttcggccaagggaccaaggtggaaatcaaacgg

SEQ ID NO: 572 - protein, 108 aa, Artificial Sequence
  Synthetic peptide
DIQMTQSPSFLSASVGDRVTITCRASKFIGSELGWFQQKPGKAPKLLIGVTSVLQRGVPSRFSGSGSGTDFTLTISSLQPEDFATYYCFQHLADPPTFGQGTKVEIKR

SEQ ID NO: 573 - DNA, 324 bp, Artificial Sequence
  Synthetic oligonucleotide
gacatccagatgacccagtctccatcctccctgtctgcatctgtaggagaccgtgtcaccatcacttgccgggcaagtctgcctattgtgaggagtttagtgtggtaccagcagaaaccagggaaagcccctaagctcctgatcgggggggggtccgtgttgcaaagtggggtcccatcacgtttcagtggcagtggatctgggacagatttcactctcaccatcagcagtctgcaacctgaagattttgctacgtactactgtgggcagtatcgtatgtggccttatacgttcggccaagggaccaaggtggaaatcaaacgg

SEQ ID NO: 574 - protein, 108 aa, Artificial Sequence
  Synthetic peptide
DIQMTQSPSSLSASVGDRVTITCRASLPIVRSLVWYQQKPGKAPKLLIGGGSVLQSGVPSRFSGSGSGTDFTLTISSLQPEDFATYYCGQYRMWPYTFGQGTKVEIKR

SEQ ID NO: 575 - DNA, 324 bp, Artificial Sequence
  Synthetic oligonucleotide
gacatccagatgacccagtctccatcctccctgtctgcatctgtaggagaccgtgtcaccatcacttgccgggcaagttcgcatattcctgttgatttagagtggtaccagcagaaaccagggaaagcccctaagctcctgatcggtgggtcgtcctggttgcaaagtggggtcccatcacgtttcagtggcagtggatctgggacagatttcactctcaccatcagcagtctgcaacctgaagattttgctacgtactactgttttcaggattgggttttgcctcatacgttcggccaagggaccaaggtggaaatcaaacgg

SEQ ID NO: 576 - protein, 108 aa, Artificial Sequence
  Synthetic peptide
DIQMTQSPSSLSASVGDRVTITCRASSHIPVDLEWYQQKPGKAPKLLIGGSSWLQSGVPSRFSGSGSGTDFTLTISSLQPEDFATYYCFQDWVLPHTFGQGTKVEIKR

SEQ ID NO: 577 - DNA, 324 bp, Artificial Sequence
  Synthetic oligonucleotide
gacatccagatgacccagtctccatcctccctgtctgcatctgtaggagaccgtgtcaccatcacttgccggacaagtaagcatattcattctgctttatggtggtaccagcagaaaccagggaaagcccctaagctcctgatcgcgcatgggtcccggttgcaaagtggggtcccatcacgtttcagtggcagtggatctgggacagatttcactctcaccatcagcagtctgcaacctgaagattttgctacgtactactgtggtcaggcttatgctcggccttttacgttcggccaagggaccaaggtggaaatcaaacgg

SEQ ID NO: 578 - protein, 108 aa, Artificial Sequence
  Synthetic peptide
DIQMTQSPSSLSASVGDRVTITCRTSKHIHSALWWYQQKPGKAPKLLIAHGSRLQSGVPSRFSGSGSGTDFTLTISSLQPEDFATYYCGQAYARPFTFGQGTKVEIKR

SEQ ID NO: 579 - DNA, 324 bp, Artificial Sequence
  Synthetic oligonucleotide
gacatccagatgacccagtctccatcctccctgtctgcatctgtaggagaccgtgtcaccatcacttgccgggcaagttctccgattaatgcgagtttatggtggtaccagcagaaaccagggaaagcccctaagctcctgatcactcagtcgtccgctttgcaaagtggggtcccatcacgtttcagtggcagtggatctgggacagatttcactctcaccatcagcagtctgcaacctgaagattttgctacgtactactgtgggcaggcggctcatcgtccttatacgttcggccaagggaccaaggtggaaatcaaacgg

SEQ ID NO: 580 - protein, 108 aa, Artificial Sequence
  Synthetic peptide
DIQMTQSPSSLSASVGDRVTITCRASSPINASLWWYQQKPGKAPKLLITQSSALQSGVPSRFSGSGSGTDFTLTISSLQPEDFATYYCGQAAHRPYTFGQGTKVEIKR

SEQ ID NO: 581 - DNA, 324 bp, Artificial Sequence
  Synthetic oligonucleotide
gacatccagatgacccagtctccatcctccctgtctgcatctgtaggagaccgtgtcaccatcacttgccgggcaagtattgatattgctaaggggttagcgtggtaccagcagaaaccagggaaagcccctatgctcctgatcactgggtggtccgggttgcaaagtggggtcccatcacgtttcagtggcagtggatctgggacagatttcactctcaccatcagcagtctgcaacctgaagattttgctacgtactactgtgttcaggttgtggctgagccttttacgttcggccaagggaccaaggtggaaatcaaacgg

SEQ ID NO: 582 - protein, 108 aa, Artificial Sequence
  Synthetic peptide
DIQMTQSPSSLSASVGDRVTITCRASIDIAKGLAWYQQKPGKAPMLLITGWSGLQSGVPSRFSGSGSGTDFTLTISSLQPEDFATYYCVQVVAEPFTFGQGTKVEIKR

SEQ ID NO: 583 - DNA, 324 bp, Artificial Sequence
  Synthetic oligonucleotide
gacatccagatgacccagtctccatcctccctgtctgcatctgtaggagaccgtgtcaccatcacttgccgggcaagtggtacgattatgggttcgttatggtggtaccagcagaaaccagggaaagcccctaagctcctgatcagggatgtttccaggttgcaaagtggggtcccatcacgtttcagtggcagtggatctgggacagatttcactctcaccatcagcagtctgcaacctgaagattttgctacgtactactgtggtcagtcttgggcgcggccttttacgttcggccaagggaccaaggtggaaatcaaacgg

SEQ ID NO: 584 - protein, 108 aa, Artificial Sequence
  Synthetic peptide
DIQMTQSPSSLSASVGDRVTITCRASGTIMGSLWWYQQKPGKAPKLLIRDVSRLQSGVPSRFSGSGSGTDFTLTISSLQPEDFATYYCGQSWARPFTFGQGTKVEIKR

SEQ ID NO: 585 - DNA, 324 bp, Artificial Sequence
  Synthetic oligonucleotide
gacatccagatgacccagtctccatcctccctgtctgcatctgtaggagaccgtgtcaccatcacttgccaggcaagtaagaatattggtgagcggttagtttggtaccagcagaaaccagggaaagcccctaagctcctgatcgggtttgcttccttgttgcaaagtggggtcccatcacgtttcagtggcagtggatctgggacagatttcactctcaccatcagcagtctgcaacctgaagattttgctacgtactactgtggtcagtatcgttgggttcctgcgacgttcggccaagggaccaaggtggaaatcaaacgg

SEQ ID NO: 586 - protein, 108 aa, Artificial Sequence
  Synthetic peptide
DIQMTQSPSSLSASVGDRVTITCQASKNIGERLVWYQQKPGKAPKLLIGFASLLQSGVPSRFSGSGSGTDFTLTISSLQPEDFATYYCGQYRWVPATFGQGTKVEIKR

SEQ ID NO: 587 - DNA, 324 bp, Artificial Sequence
  Synthetic oligonucleotide
gacatccagatgacccagtctccatcctccctgtctgcatctgtaggagaccgtgtcaccatcacttgccgggcaagtaagaatattggtactaggttagtttggtaccagcagaaaccagggaaagcccctaagctcctgatcggtgttgtttccttgttgcaaagtggggtcccatcacgtttcagtggcagtggatctgggacagatttcactctcaccatcagcagtctgcaacctgaagattttgctacgtactactgtggtcagtatggggagtggccttatacgttcggccaagggaccaaggtggaaatcaaacgg

SEQ ID NO: 588 - protein, 108 aa, Artificial Sequence
  Synthetic peptide
DIQMTQSPSSLSASVGDRVTITCRASKNIGTRLVWYQQKPGKAPKLLIGVVSLLQSGVPSRFSGSGSGTDFTLTISSLQPEDFATYYCGQYGEWPYTFGQGTKVEIKR

SEQ ID NO: 589 - DNA, 324 bp, Artificial Sequence
  Synthetic oligonucleotide
gacatccagatgacccagtctccatcctccctgtctgcatctgtaggagaccgtgtcaccatcacttgccgggcaagtaagcctattggtgagcggttaggttggtaccagcagaaaccagggaaagcccctaagctcctgatctggcgtcggtcctatttgcaaagtggggtcccatcacgtttcagtggcagtggatctgggacagatttcactctcaccatcagcagtctgcaacctgaagattttgctacgtactactgtatgcagtatgagcgtctgcctaagacgttcggccaagggaccaaggtggaaatcaaacgg

SEQ ID NO: 590 - protein, 108 aa, Artificial Sequence
  Synthetic peptide
DIQMTQSPSSLSASVGDRVTITCRASKPIGERLGWYQQKPGKAPKLLIWRRSYLQSGVPSRFSGSGSGTDFTLTISSLQPEDFATYYCMQYERLPKTFGQGTKVEIKR

SEQ ID NO: 591 - DNA, 324 bp, Artificial Sequence
  Synthetic oligonucleotide
gacatccagatgacccagtctccatcctccctgtctgcatctgtaggagaccgtgtcaccatcacttgccgggcaagtagtaatattgggtcgcggttagtgtggtaccagcagaaaccagggaaagcccctaagctcctgatcttgtgggggtccgttttgcaaagtggggtcccatcacgtttcagtggcagtggatctgggacagatttcactctcaccatcggcagtctgcaacctgaagattttgctacgtactactgtggtcagcatcatacggagcctgctacgttcggccaagggaccaaggtggaaatcaaacgg

SEQ ID NO: 592 - protein, 108 aa, Artificial Sequence
  Synthetic peptide
DIQMTQSPSSLSASVGDRVTITCRASSNIGSRLVWYQQKPGKAPKLLILWGSVLQSGVPSRFSGSGSGTDFTLTIGSLQPEDFATYYCGQHHTEPATFGQGTKVEIKR

SEQ ID NO: 593 - DNA, 324 bp, Artificial Sequence
  Synthetic oligonucleotide
gacatccagatgacccagtctccatcctccctgtctgcatctgtaggagaccgtgtcaccatcacttgccgggcaagtcagtcgattatgagtgctttagcgtggtaccagcagaaaccagggaaagcccctaagctcctgatcactgggtggtccgggttgcaaagtggggtcccatcacgtttcagtggcagtggatctgggacagatttcactctcaccatcagcagtctgcaacctgaagattttgctacgtactactgtggtcaggtttgggtttcgcctccgacgttcggccaagggaccaaggtggaaatcaaacgg

SEQ ID NO: 594 - protein, 108 aa, Artificial Sequence
  Synthetic peptide
DIQMTQSPSSLSASVGDRVTITCRASQSIMSALAWYQQKPGKAPKLLITGWSGLQSGVPSRFSGSGSGTDFTLTISSLQPEDFATYYCGQVWVSPPTFGQGTKVEIKR

SEQ ID NO: 595 - DNA, 324 bp, Artificial Sequence
  Synthetic oligonucleotide
gacatccagatgacccagtctccatcctccctgtctgcatctgtaggagaccgtgtcaccatcacttgccgggcaagtagtgatattagtagtagtttagtgtggtaccagcagaaaccagggaaagcccctaagctcctgatctggggtgggtcccggttgcaaagtggggtcccatcacgtttcagtggcagtggatctgggacagatttcactctcaccatcagcagtctgcaacctgaagattttgctacgtactactgtgggcaggctcgtgtgccgccttatacgttcggccaagggaccaaggtggaaatcaaacgg

SEQ ID NO: 596 - protein, 108 aa, Artificial Sequence
  Synthetic peptide
DIQMTQSPSSLSASVGDRVTITCRASSDISSSLVWYQQKPGKAPKLLIWGGSRLQSGVPSRFSGSGSGTDFTLTISSLQPEDFATYYCGQARVPPYTFGQGTKVEIKR

SEQ ID NO: 597 - DNA, 324 bp, Artificial Sequence
  Synthetic oligonucleotide
gacatccagatgacccagtctccatcctccctgtctgcatctgtaggagaccgtgtcaccatcacttgccgggcaagtggggatattaatgaggcgttatggtggtaccagcagaaaccagggaaagcccctaagctcctgatcgtggatggttcccttttgcaaagtggggtcccatcacgtttcagtggcagtggatctgggacagatttcactctcaccatcagcagtctgcaacctgaagattttgctacgtactactgtggtcagtcgtcggtgcgtccttttacgttcggccaagggaccaaggtggaaatcaaacgg

SEQ ID NO: 598 - protein, 108 aa, Artificial Sequence
  Synthetic peptide
DIQMTQSPSSLSASVGDRVTITCRASGDINEALWWYQQKPGKAPKLLIVDGSLLQSGVPSRFSGSGSGTDFTLTISSLQPEDFATYYCGQSSVRPFTFGQGTKVEIKR

SEQ ID NO: 599 - DNA, 324 bp, Artificial Sequence
  Synthetic oligonucleotide
gacatccagatgacccagtctccatcctccctgtctgcatctgtaggagaccgtgtcaccatcacttgccgggcaagtcagccgattggtaggaagttaaattggtaccagcagaaaccagggaaagcccctaagctcctgatccataagatttcctttttgcaaagtggggtcccatcacgtttcagtggcagtggatctgggacagatttcactctcaccatcagcagtctgcaacctgaagattttgcgacgtactactgtcaacagtataagcagcctccttttacgttcggccaagggaccaaggtggaaatcaaacgg

SEQ ID NO: 600 - protein, 108 aa, Artificial Sequence
  Synthetic peptide
DIQMTQSPSSLSASVGDRVTITCRASQPIGRKLNWYQQKPGKAPKLLIHKISFLQSGVPSRFSGSGSGTDFTLTISSLQPEDFATYYCQQYKQPPFTFGQGTKVEIKR

SEQ ID NO: 601 - DNA, 324 bp, Artificial Sequence
  Synthetic oligonucleotide
gacatccagatgacccagtctccatcctccctgtctgcatctgtaggagaccgtgtcaccatcacttgccgggcaagtcagcgtattgggcataggttagtttggtaccagcagaaaccagggaaagcccctaagctcctgatctatcgggcttcctggttgcaaagtggggtcccatcacgtttcagtggcagtggatctgggacagatttcactctcaccatcagcagtctgcaacctgaagattttgctacgtactactgtcaacagactaatcggcgtccttttacgttcggccaagggaccaaggtggaaatcaaacgg

SEQ ID NO: 602 - protein, 108 aa, Artificial Sequence
  Synthetic peptide
DIQMTQSPSSLSASVGDRVTITCRASQRIGHRLVWYQQKPGKAPKLLIYRASWLQSGVPSRFSGSGSGTDFTLTISSLQPEDFATYYCQQTNRRPFTFGQGTKVEIKR

SEQ ID NO: 603 - DNA, 324 bp, Artificial Sequence
  Synthetic oligonucleotide
gacatccagatgacccagtctccatcctccctgtctgcatctgtaggagaccgtgtcaccatcacttgccgggcaagtcagaatattcgtactaggttagcttggtaccagcagaaaccagggaaagcccctaagctcctgatctataggtcttcccgtttgcaaagtggggtcccatcacgtttcagtggcagtggatctgggacagatttcactctcaccatcagcagtctgcaacctgaagattttgctacgtactactgtcaacagttttatcggcatcctactacgttcggccaagggaccaaggtggaaatcaaacgg

SEQ ID NO: 604 - protein, 108 aa, Artificial Sequence
  Synthetic peptide
DIQMTQSPSSLSASVGDRVTITCRASQNIRTRLAWYQQKPGKAPKLLIYRSSRLQSGVPSRFSGSGSGTDFTLTISSLQPEDFATYYCQQFYRHPTTFGQGTKVEIKR

SEQ ID NO: 605 - DNA, 348 bp, Artificial Sequence
  Synthetic oligonucleotide
gaggtgcagctgttggagtctgggggaggcttggtacagcctggggggtccctgcgtctctcctgtgcagcctccggattcacctttgctgattatccgatggagtgggcccgccaggctccagggaagggtcttgagtgggtctcaggtatttcgcgggatggtagtcgtacatactacgcagactccgtgaagggccggttcaccatctcccgcgacaattccaagaacacgctgtatctgcaaatgaacagcctgcgtgccgaggataccgcggtatattactgtgcgaaaatggggtcgaattttgactactggggtcagggaaccctggtcaccgtctcgagc

SEQ ID NO: 606 - protein, 116 aa, Artificial Sequence
  Synthetic peptide
EVQLLESGGGLVQPGGSLRLSCAASGFTFADYPMEWARQAPGKGLEWVSGISRDGSRTYYADSVKGRFTISRDNSKNTLYLQMNSLRAEDTAVYYCAKMGSNFDYWGQGTLVTVSS

SEQ ID NO: 607 - DNA, 357 bp, Artificial Sequence
  Synthetic oligonucleotide
gaggtgcagctgttggagtctgggggaggcttggtacagcctggggggtccctgcgtctctcctgtgcagcctccggattcacctttgatgcttatgctatgggttgggtccgccaggctccagggaagggtctagagtgggtctcagatattgggactaatggtgggcatacatactacgcagactccgtgaagggccggttcaccatctcccgcgacaattccaagaacacgctgtatctgcaaatgaacagcctgcgtgccgaggacaccgcggtatattactgtgcgaaatttgatcctattcgtcgggagtttgactactggggtcagggaaccctggtcaccgtctcgagc

SEQ ID NO: 608 - protein, 119 aa, Artificial Sequence
  Synthetic peptide
EVQLLESGGGLVQPGGSLRLSCAASGFTFDAYAMGWVRQAPGKGLEWVSDIGTNGGHTYYADSVKGRFTISRDNSKNTLYLQMNSLRAEDTAVYYCAKFDPIRREFDYWGQGTLVTVSS

SEQ ID NO: 609 - DNA, 360 bp, Artificial Sequence
  Synthetic oligonucleotide
gaggtgcagctgttggagtctgggggaggcttggtacagcctggggggtccctgcgtctctcctgtgcagcctccggattcacctttgggttgtattctatggagtgggtccgccaggctccagggaagggtctagagtgggtctcagggattactcgttctggtgataagacatactacgcagactccgtgaagggccggttcaccatctcccgcgacaattccaagaacacgctgtatctgcaaatgaacagcctgcgtgccgaggacaccgcggtatattactgtgcgaaacctaggaatcgtacgtttaggatgtttgactactggggtcagggaaccctggtcaccgtctcgagc

SEQ ID NO: 610 - protein, 120 aa, Artificial Sequence
  Synthetic peptide
EVQLLESGGGLVQPGGSLRLSCAASGFTFGLYSMEWVRQAPGKGLEWVSGITRSGDKTYYADSVKGRFTISRDNSKNTLYLQMNSLRAEDTAVYYCAKPRNRTFRMFDYWGQGTLVTVSS

SEQ ID NO: 611 - DNA, 369 bp, Artificial Sequence
  Synthetic oligonucleotide
gaggtgcagctgttggagtctggggggggcttggtacagcctggggggtccctgcgtctctcctgtgcagcctccggattcacctttcctaagtatgttatgagttgggtccgccaggctccagggaagggtctggagtgggtctcaacgattaatcaggcgggtttgaggacatactacgcagactccgtgaagggccggttcaccatctcccgcgacaattccaagaacacgctgtatctgcaaatgaacagcctgcgtgccgaggacaccgcggtatattactgtgtgaaacatgctactcgtttgatgtctggtggtcggcgttttgactactggggtcagggaaccctggtcaccgtctcgagc

SEQ ID NO: 612 - protein, 123 aa, Artificial Sequence
  Synthetic peptide
EVQLLESGGGLVQPGGSLRLSCAASGFTFPKYVMSWVRQAPGKGLEWVSTINQAGLRTYYADSVKGRFTISRDNSKNTLYLQMNSLRAEDTAVYYCVKHATRLMSGGRRFDYWGQGTLVTVSS

SEQ ID NO: 613 - DNA, 363 bp, Artificial Sequence
  Synthetic oligonucleotide
gaggtgcagctgttggagtctgggggaggcttggtacagcctggggggtccctgcgtctctcctgtgcagcctccggattcacctttaggcagtatccgatgtcgtgggtccgccaggctccagggaagggtctagagtgggtctcaacgattgatccggagggttttgtgacatactacgcagactccgtgaagggccggttcaccatctcccgcgacaattccaagaacacgctgtatctgcaaatgaacagcctgcgtgccgaggacaccgcggtatattactgtgcgaaatcgtatcgtcttaagggtgtgctgcggtttgactactggggtcagggaaccctggtcaccgtctcgagc

SEQ ID NO: 614 - protein, 121 aa, Artificial Sequence
  Synthetic peptide
EVQLLESGGGLVQPGGSLRLSCAASGFTFRQYPMSWVRQAPGKGLEWVSTIDPEGFVTYYADSVKGRFTISRDNSKNTLYLQMNSLRAEDTAVYYCAKSYRLKGVLRFDYWGQGTLVTVSS

SEQ ID NO: 615 - DNA, 348 bp, Artificial Sequence
  Synthetic oligonucleotide
gaggtgcagctgttggagtctgggggaggcttggtacagcctggggggtccctgcgtctctcctgtgcagcctccggattcacctttgagactcagcctatgatttgggtccgccaggctccagggaagggtctagagtgggtctcagggattgagggggatggtggtcgtacatactacgcagactccgtgaagggccggttcaccatctcccgcgacaattccaagaacacgctgtatctgcaaatgaacagcctgcgtgccgaggacgccgcggtatattactgtgcgaaaagtggttcttcgtttgactactggggtcagggaaccctggtcaccgtctcgagc

SEQ ID NO: 616 - protein, 116 aa, Artificial Sequence
  Synthetic peptide
EVQLLESGGGLVQPGGSLRLSCAASGFTFETQPMIWVRQAPGKGLEWVSGIEGDGGRTYYADSVKGRFTISRDNSKNTLYLQMNSLRAEDAAVYYCAKSGSSFDYWGQGTLVTVSS

SEQ ID NO: 617 - DNA, 348 bp, Artificial Sequence
  Synthetic oligonucleotide
gaggtgcagctgttggagtctgggggaggcttggtacagcctggggggtccctgcgtctctcctgtgcagcctccggattcacctttgaggatactgatatggagtgggtccgccaggctccagggaagggtctagagtgggtctcatggattccggctcatggtggtcatacatactacgcagactccgtgaagggccggttcaccatctcccgcgacaattccaagaacacgctgtatctgcaaatgaacagcctgcgtgccgaggacaccgcggtatattactgtgcgaaatcgggtgatgcttttgactactggggtcagggaaccctggtcaccgtctcgagc

SEQ ID NO: 618 - protein, 116 aa, Artificial Sequence
  Synthetic peptide
EVQLLESGGGLVQPGGSLRLSCAASGFTFEDTDMEWVRQAPGKGLEWVSWIPAHGGHTYYADSVKGRFTISRDNSKNTLYLQMNSLRAEDTAVYYCAKSGDAFDYWGQGTLVTVSS

SEQ ID NO: 619 - DNA, 348 bp, Artificial Sequence
  Synthetic oligonucleotide
gaggtgcagctgttggagtctgggggaggcttggtacagcctggggggtccctgcgtctctcctgtgcagcctccggattcacctttgaggatagtgggatgatttgggcccgccaggctccagggaagggtctggagtgggtctcagggattgcttctgagggtagtactacatactacgcagactccgtgaagggccggttcaccatctcccgcgacaattccaagaacacgctgtatctgcaaatgaacagcctgcgtgccgaggacaccgcggtatattactgtgcgaaatcgggtctgtcttttgactactggggtcagggaaccctggtcaccgtctcgagc

SEQ ID NO: 620 - protein, 116 aa, Artificial Sequence
  Synthetic peptide
EVQLLESGGGLVQPGGSLRLSCAASGFTFEDSGMIWARQAPGKGLEWVSGIASEGSTTYYADSVKGRFTISRDNSKNTLYLQMNSLRAEDTAVYYCAKSGLSFDYWGQGTLVTVSS

SEQ ID NO: 621 - DNA, 348 bp, Artificial Sequence
  Synthetic oligonucleotide
gaggtgcagctgttggagtctgggggaggcttggtacagcctggggggtccctgcgtctctcctgtgcagcctccggattcacctttgctaattatgagatgatttgggtccgccaggctccagggaagggtctagagtgggtctcagggattaatagggctggtcagcgtacatactacgcagactccgtgaagggccggttcaccatctcccgcgacaattccaagaacacgctgtatctgcaaatgaacagcctgcgtgccgaggacaccgcggtatattactgtgcgaaagctgggtcgagttttgactactggggtcagggaaccctggtcaccgtctcgagc

SEQ ID NO: 622 - protein, 116 aa, Artificial Sequence
  Synthetic peptide
EVQLLESGGGLVQPGGSLRLSCAASGFTFANYEMIWVRQAPGKGLEWVSGINRAGQRTYYADSVKGRFTISRDNSKNTLYLQMNSLRAEDTAVYYCAKAGSSFDYWGQGTLVTVSS

SEQ ID NO: 623 - DNA, 348 bp, Artificial Sequence
  Synthetic oligonucleotide
gaggtgcagctgttggagtctgggggaggcttggtacagcctggggggtccctgcgtctctcctgtgcagcctccggattcacctttgctagttatggtatgatttgggtccgccaggctccagggaagggtctggagtgggtctcagggattgagagtagtggtggggtgacatactacgcagactccgtgaagggccggttcaccatctcccgcgacaattccaagaacacgctgtatctgcaaatgaacagccttcgtgccgaggacaccgcggtatattactgtgcgaaatcggggactagttttgactactggggtcagggaaccctggtcaccgtctcgagc

SEQ ID NO: 624 - protein, 116 aa, Artificial Sequence
  Synthetic peptide
EVQLLESGGGLVQPGGSLRLSCAASGFTFASYGMIWVRQAPGKGLEWVSGIESSGGVTYYADSVKGRFTISRDNSKNTLYLQMNSLRAEDTAVYYCAKSGTSFDYWGQGTLVTVSS

SEQ ID NO: 625 - DNA, 348 bp, Artificial Sequence
  Synthetic oligonucleotide
gaggtgcagctgttggagtctgggggaggcttggtacagcctggggggtccctgcgtctctcctgtgcagcctccggattcacctttggtatgtatgatatggagtgggtccgccaggctccagggaagggtctagagtgggtctcatggattggtcatagtggtaatgatacatactacgcagactccgtgaagggccggttcaccatctcccgcgacaattccaagaacacgctgtatctgcaaatgaacagcctgcgtgccgaggacaccgcggtatattactgtgcgaaatctgggacgccgtttgactactggggtcagggaaccctggtcaccgtctcgagc

SEQ ID NO: 626 - protein, 116 aa, Artificial Sequence
  Synthetic peptide
EVQLLESGGGLVQPGGSLRLSCAASGFTFGMYDMEWVRQAPGKGLEWVSWIGHSGNDTYYADSVKGRFTISRDNSKNTLYLQMNSLRAEDTAVYYCAKSGTPFDYWGQGTLVTVSS

SEQ ID NO: 627 - DNA, 348 bp, Artificial Sequence
  Synthetic oligonucleotide
gaggtgcagctgttggagtctgggggaggcttggtacagcctggggggtccctgcgtctctcctgtgcagcctccggattcacctttgctaagtatgatatgatttgggtccgccaggctccagggaagggtctagagtgggtctcaggtattaatcattctggttcgcggacatactacgcagactccgtgaagggccggttcaccatctcccgcgacaattccaagaacatgctgtatctgcaaatgaacagcctgcgtgccgaggataccgcggtatattactgtgcgaaatcgggttcgtcttttgactactggggtcagggaaccctggtcaccgtctcgagc

SEQ ID NO: 628 - protein, 116 aa, Artificial Sequence
  Synthetic peptide
EVQLLESGGGLVQPGGSLRLSCAASGFTFAKYDMIWVRQAPGKGLEWVSGINHSGSRTYYADSVKGRFTISRDNSKNMLYLQMNSLRAEDTAVYYCAKSGSSFDYWGQGTLVTVSS

SEQ ID NO: 629 - DNA, 348 bp, Artificial Sequence
  Synthetic oligonucleotide
gaggtgcagctgttggagtctgggggaggcttggtacagcctggggggtccctgcgtctctcctgtgcagcctccggattcacctttgctaagtatgatatgatttgggtccgccaggctccagggaagggtctagagtgggtctcaggtattaatcattctggttcgcggacatactacgcagactccgtgaagggccggttcaccatctcccgcgacaattccaagaacatgctgtatctgcaaatgaacagcctgcgtgccgaggataccgcggtatattactgtgcgaaacttgttcgtcataagaagtactggggtcagggaaccctggtcaccgtctcgagc

SEQ ID NO: 630 - protein, 116 aa, Artificial Sequence
  Synthetic peptide
EVQLLESGGGLVQPGGSLRLSCAASGFTFAKYDMIWVRQAPGKGLEWVSGINHSGSRTYYADSVKGRFTISRDNSKNMLYLQMNSLRAEDTAVYYCAKLVRHKKYWGQGTLVTVSS

SEQ ID NO: 631 - DNA, 348 bp, Artificial Sequence
  Synthetic oligonucleotide
gaggtgcagctgatggagtctgggggaggcttggtacagcctggggggtccctgcgtctctcctgtgcagcctccggattcacctttgctaagtatgatatgatttgggttcgccaggctccagggaagggtctagagtgggtctcaggtattaatcattctggttcgcggacatactacgcagactccgtggagggccggttcaccatctcccgcgacaattccaagaacatgctgtatctgcaaatgaacagcctgcgtgccgaggataccgcggtatattactgtgcgaaatcgggttcttcgttggtgtactggggccagggaaccctggtcaccgtctcgagc

SEQ ID NO: 632 - protein, 116 aa, Artificial Sequence
  Synthetic peptide
EVQLMESGGGLVQPGGSLRLSCAASGFTFAKYDMIWVRQAPGKGLEWVSGINHSGSRTYYADSVEGRFTISRDNSKNMLYLQMNSLRAEDTAVYYCAKSGSSLVYWGQGTLVTVSS

SEQ ID NO: 633 - DNA, 348 bp, Artificial Sequence
  Synthetic oligonucleotide
gaggtgcagctgttggagtctgggggaggcttggtacagcctggggggtccctgcgtctctcctgtgcagcctccggattcacctttgctaagtatgatatgatttgggtccgccaggctccagggaagggtctagagtgggtctcaggtattaatcattctggttcgcggacatactacgcagactccgtgaagggccggttcaccatctcccgcgacaattccaagaacatgctgtatctgcaaatgaacagcctgcgtgccgaggataccgcggtatattactgtgcgaaatcggggttgttgttgaagtactggggccagggaaccctggtcatcgtctcgagc

SEQ ID NO: 634 - protein, 116 aa, Artificial Sequence
  Synthetic peptide
EVQLLESGGGLVQPGGSLRLSCAASGFTFAKYDMIWVRQAPGKGLEWVSGINHSGSRTYYADSVKGRFTISRDNSKNMLYLQMNSLRAEDTAVYYCAKSGLLLKYWGQGTLVIVSS

SEQ ID NO: 635 - DNA, 348 bp, Artificial Sequence
  Synthetic oligonucleotide
gaggtgcagctgttggagtctgggggaggcttggtacagcctggggggtccctgcgtctctcctgtgcagcctccggattcacctttgctaagtatgatatgatttgggtccgccaggctccagggaagggtctagagtgggtctcaggtattaatcattctggttcgcggacatactacgcagactccgtgaagggccggttcaccatctcccgcgacaattccaagaacatgctgtatctgcaaatgaacagcctgcgtgccgaggataccgcggtatattactgtgcgaaatcgggttcgtcgtttgagtactggggccagggaaccctggtcaccgtctcgagc

SEQ ID NO: 636 - protein, 116 aa, Artificial Sequence
  Synthetic peptide
EVQLLESGGGLVQPGGSLRLSCAASGFTFAKYDMIWVRQAPGKGLEWVSGINHSGSRTYYADSVKGRFTISRDNSKNMLYLQMNSLRAEDTAVYYCAKSGSSFEYWGQGTLVTVSS

SEQ ID NO: 637 - DNA, 348 bp, Artificial Sequence
  Synthetic oligonucleotide
gaggtgcagctgttggagtctgggggaggcttggtacagcctggggggtccctgcgtctctcctgtgcagcctccggattcacctttgctaagtatgatatgatttgggtccgccaggctccagggaagggtctagagtgggtctcaggtattaatcattctggttcgcggacatactacgcagacttcgtgaagggccggttcaccatctcccgcgacaattccaagaacatgctgtatctgcaaatgaacagcctgcgtgccgaggataccgcggtatattactgtgcgaaactggatgcttttcggaagtactggggtcagggaaccctggtcaccgtctcgagc

SEQ ID NO: 638 - protein, 116 aa, Artificial Sequence
  Synthetic peptide
EVQLLESGGGLVQPGGSLRLSCAASGFTFAKYDMIWVRQAPGKGLEWVSGINHSGSRTYYADFVKGRFTISRDNSKNMLYLQMNSLRAEDTAVYYCAKLDAFRKYWGQGTLVTVSS

SEQ ID NO: 639 - DNA, 348 bp, Artificial Sequence
  Synthetic oligonucleotide
gaggtgcagctgttggagtctgggggaggcttggtacagcctggggggtccctgcgtctctcctgtgcagcctccggattcacctttgctaagtatgatatgatttgggtccgccaggctccagggaagggtctagagtgggtctcaggtattaatcattctggttcgcggacatactacgcagactccgtgaagggccggttcaccatctcccgcgacaattccaagaacatgctgtatctgcaaatgaacagcctgcgtgccgaggataccgcggtatattactgtgcgaagcttgagcattattcgaagtactggggccagggaaccctggtcaccgtctcgagc

SEQ ID NO: 640 - protein, 116 aa, Artificial Sequence
  Synthetic peptide
EVQLLESGGGLVQPGGSLRLSCAASGFTFAKYDMIWVRQAPGKGLEWVSGINHSGSRTYYADSVKGRFTISRDNSKNMLYLQMNSLRAEDTAVYYCAKLEHYSKYWGQGTLVTVSS

SEQ ID NO: 641 - DNA, 348 bp, Artificial Sequence
  Synthetic oligonucleotide
gaggtgcagctgttggagtctgggggaggcttggtacagcctggggggtccctgcgtctctcctgtgcagcctccggtttcaccttttctacgtatccgatgctttgggcccgccaggccccagggaagggtctagagtgggtctcatcgattagtccgagtggtgattctacatactacgcaggctccgtgaagggccggttcaccatctcccgcgacaattccaagaacacgctgtatctgcaaatgaacagcctgcgtgccgaggacaccgcggtatattactgtgtgaaatcggtgcggtatttggattactggggccagggaaccctggtcaccgtctcgagc

SEQ ID NO: 642 - protein, 116 aa, Artificial Sequence
  Synthetic peptide
EVQLLESGGGLVQPGGSLRLSCAASGFTFSTYPMLWARQAPGKGLEWVSSISPSGDSTYYAGSVKGRFTISRDNSKNTLYLQMNSLRAEDTAVYYCVKSVRYLDYWGQGTLVTVSS

SEQ ID NO: 643 - DNA, 348 bp, Artificial Sequence
  Synthetic oligonucleotide
gaggtgcagctgttggagtctgggggaggcttggtacagcctggggggtccctgcgtctctcctgtgcagcctccggattcacctttgctggggctaatatgatttgggtccgccaggctccagggaagggtctagagtgggtctcaggtattaatcattctggttcgcggacatactacgcaggctccgtgaagggccggttcaccatctcccgcgacaattccaagaacacgctgtatctgcaaatgaacagcctgcgtgccgaggacaccgcggtatattactgtgtgaaatcggtgcggtatttggattactggggccagggaaccctggtcaccgtctcgagc

SEQ ID NO: 644 - protein, 116 aa, Artificial Sequence
  Synthetic peptide
EVQLLESGGGLVQPGGSLRLSCAASGFTFAGANMIWVRQAPGKGLEWVSGINHSGSRTYYAGSVKGRFTISRDNSKNTLYLQMNSLRAEDTAVYYCVKSVRYLDYWGQGTLVTVSS

SEQ ID NO: 645 - DNA, 348 bp, Artificial Sequence
  Synthetic oligonucleotide
gaggtgcagctgttggagtctgggggaggcttggtacagcctggggggtccctgcgtctctcctgtgcagcctccggattcacctttgctaagtatgcgattatttgggtccgccaggctccagggaagggtctagagtgggtctcgggtattaatcattctggttcgcggacatactacgcagactccgtgaagggccggttcaccatctcccgcgacaattccaagaacatgctgtatctgcaaatgaacagcctgcgtgccgaggataccgcggtatattactgtgcgaaagctggtacttcgttggagtactggggtcagggaaccctggtcaccgtctcgagc

SEQ ID NO: 646 - protein, 116 aa, Artificial Sequence
  Synthetic peptide
EVQLLESGGGLVQPGGSLRLSCAASGFTFAKYAIIWVRQAPGKGLEWVSGINHSGSRTYYADSVKGRFTISRDNSKNMLYLQMNSLRAEDTAVYYCAKAGTSLEYWGQGTLVTVSS

SEQ ID NO: 647 - DNA, 348 bp, Artificial Sequence
  Synthetic oligonucleotide
gaggtgcagctgttggagtctgggggaggcttggtacagcctggggggtccctgcgtctctcctgtgcagcctccggattcacctttgctaagtatgatatgatttgggtccgccaggctccagggaagggtctagagtgggtctcaggtattaatcattctggttcgcggacatactacgcagactccgtgaagggccggttcaccatctcccgcgacaactccaagaacatgctgtatctgcaaatgaacagcctgcgtgccgaggataccgcggtatattactgtgcgaaacgtgggtcttcgttggagcactggggccagggaaccctggtcaccgtctcgagc

SEQ ID NO: 648 - protein, 116 aa, Artificial Sequence
  Synthetic peptide
EVQLLESGGGLVQPGGSLRLSCAASGFTFAKYDMIWVRQAPGKGLEWVSGINHSGSRTYYADSVKGRFTISRDNSKNMLYLQMNSLRAEDTAVYYCAKRGSSLEHWGQGTLVTVSS

SEQ ID NO: 649 - DNA, 348 bp, Artificial Sequence
  Synthetic oligonucleotide
gaggtgcagctgttggagtctgggggaggcttggtacagcctggggggtccctgcgtctctcctgtgcagcctccggattcacctttgctaagtatgatatgatttgggtccgccaggctccagggaagggtctagagtgggtctcaggtattaatcattctggttcgcggacatactacgcagactccgtgaagggccggttcaccatctcccgcgacaattccaagaacatgctgtatctgcaaatgaacagcctgcgtgccgaggataccgcggtatattactgtgcgaaaactgggtcttcgtcggattactggggccagggaaccctggtcaccgtctcgagc

SEQ ID NO: 650 - protein, 116 aa, Artificial Sequence
  Synthetic peptide
EVQLLESGGGLVQPGGSLRLSCAASGFTFAKYDMIWVRQAPGKGLEWVSGINHSGSRTYYADSVKGRFTISRDNSKNMLYLQMNSLRAEDTAVYYCAKTGSSSDYWGQGTLVTVSS

SEQ ID NO: 651 - DNA, 348 bp, Artificial Sequence
  Synthetic oligonucleotide
gaggtgcagctgttggagtctgggggaggcttggtacagcctggggggtccctgcgtctctcctgtgcagcctccggattcacctttgctaagtatgatatgatttgggtccgccaggctccagggaagggtctagagtgggtctcaggtattaatcattctggttcgcggacatactacgcagactccgtgaagggccggttcaccatctcccgcgacaattccaagaacatgctgtatctgcaaatgaacagcctgcgtgccgaggataccgcggtatattactgtgcgaaatcgggttcgtcggtggagtactggggccagggaaccctggtcatcgtctcgagc

SEQ ID NO: 652 - protein, 116 aa, Artificial Sequence
  Synthetic peptide
EVQLLESGGGLVQPGGSLRLSCAASGFTFAKYDMIWVRQAPGKGLEWVSGINHSGSRTYYADSVKGRFTISRDNSKNMLYLQMNSLRAEDTAVYYCAKSGSSVEYWGQGTLVIVSS

SEQ ID NO: 653 - DNA, 348 bp, Artificial Sequence
  Synthetic oligonucleotide
gaggtgcagctgttggagtctgggggaggcttggtacagcctggggggtccctgcgtctctcctgtgcagcctccggattcacctttgctgattatggtatgatttgggtccgccaggctccagggaagggtctagagtgggtctcaggtatttctcctcctggtgataggacatactacgcagactccgtgaagggccggttcaccatctcccgcgacaattccaagaacacgctgtatctgcaaatgaacagcctgcgtgccgaggataccgcggtatattactgtgcgaaagctggtactagttttgactactggggtcagggaaccctggtcaccgtctcgagc

SEQ ID NO: 654 - protein, 116 aa, Artificial Sequence
  Synthetic peptide
EVQLLESGGGLVQPGGSLRLSCAASGFTFADYGMIWVRQAPGKGLEWVSGISPPGDRTYYADSVKGRFTISRDNSKNTLYLQMNSLRAEDTAVYYCAKAGTSFDYWGQGTLVTVSS

SEQ ID NO: 655 - DNA, 360 bp, Artificial Sequence
  Synthetic oligonucleotide
gaggtgcagctgttggagtctgggggaggcttggtacagcctggggggtccctgcgtctctcctgtgcagcctccggattcacctttcatcggtatactatgggttgggtccgccaggctccagggaagggtctagagtgggtctcagatatttctcctagtggtcgggagacatactacgcagactccgtgaagggccggttcaccatctcccgcgacaattccaagaacacgctgtatctgcaaatgaacagcctgcgtgccgaggacaccgcggtatattactgtgcgaaatttggtcctcttgcgtcggagccgtttgactactggggtcaggggaccctggtcaccgtctcgagc

SEQ ID NO: 656 - protein, 120 aa, Artificial Sequence
  Synthetic peptide
EVQLLESGGGLVQPGGSLRLSCAASGFTFHRYTMGWVRQAPGKGLEWVSDISPSGRETYYADSVKGRFTISRDNSKNTLYLQMNSLRAEDTAVYYCAKFGPLASEPFDYWGQGTLVTVSS

SEQ ID NO: 657 - DNA, 363 bp, Artificial Sequence
  Synthetic oligonucleotide
gaggtgcagctgttggagtctgggggaggcttggtacagcctggggggtccctgcgtctctcctgtgcagcctccggattcacctttagttcgtatcctatgttttgggtccgccaggctccagggaagggtctggagtgggtctcagatatttctattgatggtacgcttacatactacgcagactccgtgaagggccggttcaccatctcccgcgacaattccaagaacacgctgtatctgcaaatgaacagcctgcgtgccgaggacaccgcggtatattactgtgcgaaaggtcgggtgcctcataagctgagtgcttttgactactggggtcagggaaccctggtcaccgtctcgagc

SEQ ID NO: 658 - protein, 121 aa, Artificial Sequence
  Synthetic peptide
EVQLLESGGGLVQPGGSLRLSCAASGFTFSSYPMFWVRQAPGKGLEWVSDISIDGTLTYYADSVKGRFTISRDNSKNTLYLQMNSLRAEDTAVYYCAKGRVPHKLSAFDYWGQGTLVTVSS

SEQ ID NO: 659 - DNA, 363 bp, Artificial Sequence
  Synthetic oligonucleotide
gaggtgcagctgtcggagtctgggggaggcttagtacagcctggggggtccctgcgtctctcctgtgcagcctccggattcacctttcctagttatactatgggttgggtccgccaggctccagggaagggtctggagtgggtctcagatattagtccggatggtaggagtacatactacgcacactccgtgaagggccggttcaccatctcccgcgacaattccaagaacacgctgtatctgcaaatgaacagcctgcgtgccgaggataccgcggtatattactgtgcgaaatttgggcttctttcgccgggtcatccttttgactactggggtcagggaaccctggtcaccgtctcgagc

SEQ ID NO: 660 - protein, 121 aa, Artificial Sequence
  Synthetic peptide
EVQLSESGGGLVQPGGSLRLSCAASGFTFPSYTMGWVRQAPGKGLEWVSDISPDGRSTYYAHSVKGRFTISRDNSKNTLYLQMNSLRAEDTAVYYCAKFGLLSPGHPFDYWGQGTLVTVSS

SEQ ID NO: 661 - DNA, 363 bp, Artificial Sequence
  Synthetic oligonucleotide
gaggtgcagctgttggagtctgggggaggcttggtacagcctggggggtccctgcgtctctcctgtgcagcctccggattcacctttcatgagtataatatgtggtgggtccgccaggctccagggaagggtctagagtgggtctcagggattccggggggtggtggtcggacatactacgcagactccgtgaagggccggttcaccatctcccgcgacaattccaagaacacgctgtatctgcaaatgaacagcctgcgtgccgaggataccgcggtatattactgtgcgaaaactaagcttagtccgcctttttctgggtttgactactggggtcaaggaaccctggtcaccgtctcgagc

SEQ ID NO: 662 - protein, 121 aa, Artificial Sequence
  Synthetic peptide
EVQLLESGGGLVQPGGSLRLSCAASGFTFHEYNMWWVRQAPGKGLEWVSGIPGGGGRTYYADSVKGRFTISRDNSKNTLYLQMNSLRAEDTAVYYCAKTKLSPPFSGFDYWGQGTLVTVSS

SEQ ID NO: 663 - DNA, 357 bp, Artificial Sequence
  Synthetic oligonucleotide
gaggtgcagctgttggagtctgggggaggcttggtacagcctggggggtccctgcgtctctcctgtgcagcctccggattcacctttgggttttatgagatgacgtgggtccgccaggctccagggaagggtctagagtgggtctcaactatttcgtctcatggtattcggacatactacgcagactccgtgaagggccggttcaccatctcccgcgacaattccaagaacacgctgtatctgcaaatgaacagcctgcgtgccgaggacaccgcggtatattactgtgcgaaacggaggtcgtcgggtcatgggtttgactactggggtcagggaaccctggtcaccgtctcgagc

SEQ ID NO: 664 - protein, 119 aa, Artificial Sequence
  Synthetic peptide
EVQLLESGGGLVQPGGSLRLSCAASGFTFGFYEMTWVRQAPGKGLEWVSTISSHGIRTYYADSVKGRFTISRDNSKNTLYLQMNSLRAEDTAVYYCAKRRSSGHGFDYWGQGTLVTVSS

SEQ ID NO: 665 - DNA, 348 bp, Artificial Sequence; identical to SEQ ID NO: 627
  Synthetic oligonucleotide

SEQ ID NO: 666 - protein, 116 aa, Artificial Sequence; identical to SEQ ID NO: 628
  Synthetic peptide

SEQ ID NO: 667 - DNA, 363 bp, Artificial Sequence
  Synthetic oligonucleotide
gaggtgcagctgttggagtctgggggaggcttggtacagcctggggggtccctgcgtctctcctgtgcagcctccggattcacctttcgtggttatacgatggggtgggtccgccaggctccagggaagggtctggagtgggtctcagatattgatgctactggtcgtcggacatactacgcagactccgtgaagggccggttcaccatctcccgcgacaattccaagaacacgctgtatctgcaaatgaacagcctgcgtgccgaggataccgcggtatattactgtgcgaaatgggtgtcggctggtcctaatagttcttttgactactggggtcagggaaccctggtcaccgtctcgagc

SEQ ID NO: 668 - protein, 121 aa, Artificial Sequence
  Synthetic peptide
EVQLLESGGGLVQPGGSLRLSCAASGFTFRGYTMGWVRQAPGKGLEWVSDIDATGRRTYYADSVKGRFTISRDNSKNTLYLQMNSLRAEDTAVYYCAKWVSAGPNSSFDYWGQGTLVTVSS

SEQ ID NO: 669 - DNA, 360 bp, Artificial Sequence
  Synthetic oligonucleotide
gaggtgcagctgttggagtctgggggaggcttggtacagcctggggggtccctgcgtctctcctgtgcagcctccggattcacctttggtgatgctaatatggggtgggtccgccaggctccagggaagggtctagagtgggtctcagatattggtccgcatggtgagaatacttactacgcagactccgtgaagggccggttcaccatctcccgcgacaattccaagaacacgctgtatctgcaaatgaacagcctgcgtgccgaggataccgcggtatattactgtgcgaaatttccgcatgttccgcatatgccttttgactactggggtcagggaaccctggtcaccgtctcgagc

SEQ ID NO: 670 - protein, 120 aa, Artificial Sequence
  Synthetic peptide
EVQLLESGGGLVQPGGSLRLSCAASGFTFGDANMGWVRQAPGKGLEWVSDIGPHGENTYYADSVKGRFTISRDNSKNTLYLQMNSLRAEDTAVYYCAKFPHVPHMPFDYWGQGTLVTVSS

SEQ ID NO: 671 - DNA, 360 bp, Artificial Sequence
  Synthetic peptide
gaggtgcagctgttggagtctgggggaggcttggtacagcctggggggtccctgcgtctctcctgtgcagcctccggattcacctttgcgaattatggtatgtattgggcccgccaggctccagggaagggtctagagtgggtctcagggattaatcctcttggttctaggacatactacgcagactccgtgaagggccggttcaccatctcccgcgacaattccaagaacacgctgtatctgcaaatgaacagcctgcgtgccgaggacaccgcggtatattactgtgcgaaaacggagaataggagtactagtgtgtttgactactggggtcagggaaccctggtcaccgtctcgagc

SEQ ID NO: 672 - protein, 120 aa, Artificial Sequence
  Synthetic peptide
EVQLLESGGGLVQPGGSLRLSCAASGFTFANYGMYWARQAPGKGLEWVSGINPLGSRTYYADSVKGRFTISRDNSKNTLYLQMNSLRAEDTAVYYCAKTENRSTSVFDYWGQGTLVTVSS

SEQ ID NO: 673 - DNA, 357 bp, Artificial Sequence
  Synthetic oligonucleotide
gaggtgcagctgttggagtctgggggaggcttggtacagcctggggggtccctgcgtctctcctgtgcagcctccggattcacctttgaggcggagacgatgggttgggtccgccaggctccagggaagggtctagagtgggtctcagatattgatgggcggggtgagaggacatactacgcagactccgtgaagggccggttcaccatctcccgcgacaattccaagaacacgctgtatctgcaaatgaacagcctgcgtgccgaggacaccgcggtatattactgtgcgaaatttgatttggctaagcatggttttgactactggggtcagggaaccctggtcaccgtctcgagc

SEQ ID NO: 674 - protein, 119 aa, Artificial Sequence
  Synthetic peptide
EVQLLESGGGLVQPGGSLRLSCAASGFTFEAETMGWVRQAPGKGLEWVSDIDGRGERTYYADSVKGRFTISRDNSKNTLYLQMNSLRAEDTAVYYCAKFDLAKHGFDYWGQGTLVTVSS

SEQ ID NO: 675 - DNA, 363 bp, Artificial Sequence
  Synthetic oligonucleotide
gaggtgcagctgttggagtctggaggaggcttggtacagcctggggggtccctgcgtctctcctgtgcagcctccggattcacctttaatgattatgatatgggttgggtccgccaggctccagggaagggtctagagtgggtctcagatatttcgagtactggtagggctacatactacgcagactccgtgaagggccggttcaccatctcccgcgacaattccaagaacacgctgtatctgcaaatgaacagcctgcgtgccgaggataccgcggtatattactgtgcgaaaatgaatggtaagtattatgatgatccgtttgactactggggtcagggaaccctggtcaccgtctcgagc

SEQ ID NO: 676 - protein, 121 aa, Artificial Sequence
  Synthetic peptide
EVQLLESGGGLVQPGGSLRLSCAASGFTFNDYDMGWVRQAPGKGLEWVSDISSTGRATYYADSVKGRFTISRDNSKNTLYLQMNSLRAEDTAVYYCAKMNGKYYDDPFDYWGQGTLVTVSS

SEQ ID NO: 677 - DNA, 363 bp, Artificial Sequence
  Synthetic oligonucleotide
gaggtgcagctgttggagtctgggggaggcttggtacagcctggggggtccctgcgtctctcctgtgcagcctccggattcacctttgatgggtatgatatggcttgggtccgccaggctccagggaagggtctagagtgggtctcatggattagtggtgatggtcttaatacatactacgcagactccgtgaagggccggttcaccatctcccgcgacaattccaagaacacgctgtatctgcaaatgaacagcctgcgtgccgaggacaccgcggtatattactgtgcgaaacagtatgattatgagtctgcttggcgttttgactactggggtcagggaaccctggtcaccgtctcgagc

SEQ ID NO: 678 - protein, 121 aa, Artificial Sequence
  Synthetic peptide
EVQLLESGGGLVQPGGSLRLSCAASGFTFDGYDMAWVRQAPGKGLEWVSWISGDGLNTYYADSVKGRFTISRDNSKNTLYLQMNSLRAEDTAVYYCAKQYDYESAWRFDYWGQGTLVTVSS

SEQ ID NO: 679 - DNA, 369 bp, Artificial Sequence; identical to SEQ ID NO: 245
  Synthetic oligonucleotide

SEQ ID NO: 680 - protein, 123 aa, Artificial Sequence; identical to SEQ ID NO: 246
  Synthetic peptide

SEQ ID NO: 681 - DNA, 372 bp, Artificial Sequence
  Synthetic oligonucleotide
gaggtgcagctgttggagtctgggggaggcttggtacagcctggggggtccctgcgtctctcctgtgcagcctccggattcacctttagtgcttatggtatgatgtgggtccgccaggctccagggaagggtctggagtgggtctcagatattgattctactggtcgggggacatactacgcagactccgtgaagggccggttcaccatctcccgcgacaattccaagaacacgctgtatctgcaaatgaacagcctgcgtgccgaggacaccgcggtatattactgtgcgaaaatggtttcgtcgcatgtggggaaggcggagagtggttttgactactggggtcagggaaccctggtcaccgtctcgagc

SEQ ID NO: 682 - protein, 124 aa, Artificial Sequence
  Synthetic peptide
EVQLLESGGGLVQPGGSLRLSCAASGFTFSAYGMMWVRQAPGKGLEWVSDIDSTGRGTYYADSVKGRFTISRDNSKNTLYLQMNSLRAEDTAVYYCAKMVSSHVGKAESGFDYWGQGTLVTVSS

SEQ ID NO: 683 - DNA, 357 bp, Artificial Sequence
  Synthetic oligonucleotide
gaggtgcagctgttggagtctgggggaggcttggtacagcctggggggtccctgcgtctctcctgtgcagcctccggattcacctttggggaggtgacgatgggttgggtccgccaggctccagggaagggtctagagtgggtctcagatattaatgctactggtgatactacatactacgcagactccgtgaagggccggttcaccatctcccgcgacaattccaagaacacgctgtatctgcaaatgaacagcctgcgtgccgaggacaccgcggtatattactgtgcgaaatgggggagtaatattcagctttttgaccactggggtcagggaaccctggtcaccgtctcgagc

SEQ ID NO: 684 - protein, 119 aa, Artificial Sequence
  Synthetic peptide
EVQLLESGGGLVQPGGSLRLSCAASGFTFGEVTMGWVRQAPGKGLEWVSDINATGDTTYYADSVKGRFTISRDNSKNTLYLQMNSLRAEDTAVYYCAKWGSNIQLFDHWGQGTLVTVSS

SEQ ID NO: 685 - DNA, 348 bp, Artificial Sequence
  Synthetic oligonucleotide
gaggtgcagctgttggagtctgggggaggcttggtacagcctggggggtccctgcgtctctcctgtgcagcctccggattcacctttagggagcatccgatgagttgggtccgccaggctccagggaagggtctagagtgggtctcatcgattagtaagcatggttcggagacatactacgcagactccgtgaagggccggttcaccatctcccgcgacaattccaagaacacgctgtatctgcaaatgaacagcctgcgtgccgaggacaccgcggtatattactgtgtgaaatcggttcgtgagtttgactactggggtcagggaaccctggtcaccgtctcgagc

SEQ ID NO: 686 - protein, 116 aa, Artificial Sequence
  Synthetic peptide
EVQLLESGGGLVQPGGSLRLSCAASGFTFREHPMSWVRQAPGKGLEWVSSISKHGSETYYADSVKGRFTISRDNSKNTLYLQMNSLRAEDTAVYYCVKSVREFDYWGQGTLVTVSS

SEQ ID NO: 687 - DNA, 348 bp, Artificial Sequence
  Synthetic oligonucleotide
gaggtgcagctgttggagtctgggggaggcttggtacagcctggggggtccctgcgtctctcctgtgcagcctccggattcacctttagggagcatccgatgagttgggtccgccaggctccagggaagggtctagagtgggtctcatcgattagtaagcatggttcggagacatactacgcagactccgtgaagggccggttcaccatctcccgcgacaattccaagaacacgctgtatctgcaaatgaacagcctgcgtgccgaggacaccgcggtatattactgtgtgaaacagactcgtcattatgatatctggggtcagggaaccctggtcaccgtctcgagc

SEQ ID NO: 688 - protein, 116 aa, Artificial Sequence
  Synthetic peptide
EVQLLESGGGLVQPGGSLRLSCAASGFTFREHPMSWVRQAPGKGLEWVSSISKHGSETYYADSVKGRFTISRDNSKNTLYLQMNSLRAEDTAVYYCVKQTRHYDIWGQGTLVTVSS

SEQ ID NO: 689 - DNA, 348 bp, Artificial Sequence
  Synthetic oligonucleotide
gaggtgcagctgttggagtctgggggaggcttggtacagcctggggggtccctgcgtctctcctgtgcagcctccggattcacctttagggagcatccgatgagttgggtccgccaggctccagggaagggtctagagtgggtctcatcgattagtaggcatggttcggagacatactacgcagactccgtgaagggccggttcaccatctcccgcgacaattccaagaacacgctgtatctgcaaatgaacagcctgcgtgccgaggacaccgcggtatattactgtgtgaaacagactcgtcattatgatatctggggtcagggaaccctggtcaccgtctcgagc

SEQ ID NO: 690 - protein, 116 aa, Artificial Sequence
  Synthetic peptide
EVQLLESGGGLVQPGGSLRLSCAASGFTFREHPMSWVRQAPGKGLEWVSSISRHGSETYYADSVKGRFTISRDNSKNTLYLQMNSLRAEDTAVYYCVKQTRHYDIWGQGTLVTVSS

SEQ ID NO: 691 - DNA, 348 bp, Artificial Sequence
  Synthetic oligonucleotide
gaggtgcagctgttggagtctgggggaggcttggtacagcctggggggtccctgcgtctctcctgtgcagcctccggattcacctttagggagcatccgatgagttgggtccgccaggctccagggaagggtctagagtgggtctcatcgattagtaagcatggttcggtgacatactacgcagactccgtgaagggccggttcaccatctcccgcgacaattccaagaacacgctgtatctgcaaatgaacagcctgcgtgccgaggacaccgcggtatattactgtgtgaaatcggttcgtgagtttgactactggggtcagggaaccctggtcaccgtctcgagc

SEQ ID NO: 692 - protein, 116 aa, Artificial Sequence
  Synthetic peptide
EVQLLESGGGLVQPGGSLRLSCAASGFTFREHPMSWVRQAPGKGLEWVSSISKHGSVTYYADSVKGRFTISRDNSKNTLYLQMNSLRAEDTAVYYCVKSVREFDYWGQGTLVTVSS

SEQ ID NO: 693 - DNA, 348 bp, Artificial Sequence
  Synthetic oligonucleotide
gaggtgcagctgttggagtctgggggaggcttggtacagcctggggggtccctgcgtctctcctgtgcagcctccggattcacctttagggagcatccgatgagttgggtccgccaggctccagggaagggtctagagtgggtctcatcgattagtaagcatggttcggagacatactacgcagactccgtgaagggccggttcaccaactcccgcgacaattccaagaacacgctgtatctgcaaatgaacagcctgcgtgccgaggacaccgcggtatattactgtgtgaaatcggttcgtgagtttgactactggggtcagggaaccctggtcaccgtctcgagc

SEQ ID NO: 694 - protein, 116 aa, Artificial Sequence
  Synthetic peptide
EVQLLESGGGLVQPGGSLRLSCAASGFTFREHPMSWVRQAPGKGLEWVSSISKHGSETYYADSVKGRFTNSRDNSKNTLYLQMNSLRAEDTAVYYCVKSVREFDYWGQGTLVTVSS

SEQ ID NO: 695 - DNA, 348 bp, Artificial Sequence
  Synthetic oligonucleotide
gaggtgcagctgttggagtctgggggaggcttggtacagcctggggggtccctgcgtctctcctgtgcagcctccggattcacctttagggagcatccgatgagttgggtccgccaggctccagggaagggtctagagtgggtctcatcgattagtaagcatggttcggagacatactacgcagactccgtgaagggccggttcaccatctcccgcgacaattccaagaacacgctgtatctgcaaatgtacagcctgcgtgccgaggacaccgcggtatattactgtgtgaaatcggttcgtgagtttgactactggggtcagggaaccctggtcaccgtctcgagc

SEQ ID NO: 696 - protein, 116 aa, Artificial Sequence
  Synthetic peptide
EVQLLESGGGLVQPGGSLRLSCAASGFTFREHPMSWVRQAPGKGLEWVSSISKHGSETYYADSVKGRFTISRDNSKNTLYLQMYSLRAEDTAVYYCVKSVREFDYWGQGTLVTVSS

SEQ ID NO: 697 - DNA, 348 bp, Artificial Sequence
  Synthetic oligonucleotide
gaggtgcagctgttggagtctgggggaggcttggtacagcctggggggtccctgcgtctctcctgtgcagcctccggattcacctttagggagcatccgatgagttgggtccgccaggctccagggaagggtctagagtgggtctcatcgattagtaagcatggttcggagtcatactacgcagactccgtgaagggccggttcaccatctcccgcgacaattccaagaacacgctgtatctgcaaatgaacagcctgcgtgccgaggacaccgcggtatattactgtgtgaaatcggttcgtgagtttgactactggggtcagggaaccctggtcaccgtctcgagc

SEQ ID NO: 698 - protein, 116 aa, Artificial Sequence
  Synthetic peptide
EVQLLESGGGLVQPGGSLRLSCAASGFTFREHPMSWVRQAPGKGLEWVSSISKHGSESYYADSVKGRFTISRDNSKNTLYLQMNSLRAEDTAVYYCVKSVREFDYWGQGTLVTVSS

SEQ ID NO: 699 - DNA, 348 bp, Artificial Sequence
  Synthetic oligonucleotide
gaggtgcagctgttggagtctgggggaggcttggtacagcctggggggtccctgcgtctctcctgtgcagcctccggattcacctttagggagcatccgatgagttgggtccgccaggctccagggaagggtctagagtgggtctcatcgattagtccgagtggtgattctacatactacgcagactccgtgaagggccggttcaccatctcccgcgacaattccaagaacacgctgtatctgcaaatgaacagcctgcgtgccgaggacaccgcggtatattactgtgtgaaatcggttcgtgagtttgactactggggtcagggaaccctggtcaccgtctcgagc

SEQ ID NO: 700 - protein, 116 aa, Artificial Sequence
  Synthetic peptide
EVQLLESGGGLVQPGGSLRLSCAASGFTFREHPMSWVRQAPGKGLEWVSSISPSGDSTYYADSVKGRFTISRDNSKNTLYLQMNSLRAEDTAVYYCVKSVREFDYWGQGTLVTVSS

SEQ ID NO: 701 - DNA, 315 bp, Artificial Sequence
  Synthetic oligonucleotide
gaggtgcagctgttggagtctgggggaggcttggtacagcctggggggtccctgcgtctctcctgtgcagcctccggattcacctttagtaattatcctatgagttgggtccgccaggctccagggaagggtcttgagtgggtctcagggatttctgctactggtacttttacatactacgcagactccgtgaagggccggttcaccatctcccgcgacaattccaagaacacgctgtatctgcaaatgaacagcctgcgtgccgaggacaccgcggtatattactgtcagggaaccctggtcaccgtctcgagc

SEQ ID NO: 702 - protein, 121 aa, Artificial Sequence
  Synthetic peptide
EVQLLESGGGLVQPGGSLRLSCAASGFTFSNYPMSWVRQAPGKGLEWVSGISATGTFTYYADSVKGRFTISRDNSKNTLYLQMNSLRAEDTAVYYCAESIKRLNNRVFDYWGQGTLVTVSS

SEQ ID NO: 703 - DNA, 354 bp, Artificial Sequence
  Synthetic oligonucleotide
gaggtgcagctgttggagtctgggggaggcttggtacagcctggggggtccctgcgtctctcctgtgcagcctccggattcacctttcatgataagactatgatgtgggtccgccaggctccagggaagggtctagagtgggtctcagatattagtcctaatggtgcgtttacatactacgcagactccgtgaagggccggttcaccatctcccgcgacaatcccaagaacacgctgtatctgcaaatgaacagcctgcgtgccgaggataccgcggtatattactgtgcgaaattggataatggtggtgcttttgactactggggtcagggaaccctggtcaccgtctcgagc

SEQ ID NO: 704 - protein, 118 aa, Artificial Sequence
  Synthetic peptide
EVQLLESGGGLVQPGGSLRLSCAASGFTFHDKTMMWVRQAPGKGLEWVSDISPNGAFTYYADSVKGRFTISRDNPKNTLYLQMNSLRAEDTAVYYCAKLDNGGAFDYWGQGTLVTVSS

SEQ ID NO: 705 - DNA, 348 bp, Artificial Sequence
  Synthetic oligonucleotide
gaggtgcagctgttggagtctgggggaggcttggtacagcctggggggtccctgcgtctctcctgtgcagcctccggattcaccttttctacgtatccgatgcattgggtccgccaggctccagggaagggtctagagtgggtctcatcgattagtccgagtggtgattctacacactacgcagactccgtgaagggccggttcaccatctcccgcgacaattccaagaacacgctgtatctgcaaatgaacagcctgcgtgccgaggacaccgcggtgtattactgtgtgaaaaatgcgctgaggtttgactactggggtcagggaaccctggtcaccgtctcgagc

SEQ ID NO: 706 - protein, 116 aa, Artificial Sequence
  Synthetic peptide
EVQLLESGGGLVQPGGSLRLSCAASGFTFSTYPMHWVRQAPGKGLEWVSSISPSGDSTHYADSVKGRFTISRDNSKNTLYLQMNSLRAEDTAVYYCVKNALRFDYWGQGTLVTVSS

SEQ ID NO: 707 - DNA, 348 bp, Artificial Sequence
  Synthetic oligonucleotide
gaggtgcagctgttggagtctaggggaggcttggtacagcctggggggtccctgcgtctctcctgtgcagcctccggattcaccttttctacgtatccgatgcattgggtccgccaggctccatggaagggtctagagtgggtctcatcgattagtccgagtggtgattctacacactacgcagactccgtgaagggccggttcaccatctcccgcgacaattccaagaacacgctgtatctgcaaatgaacagcctgcgtgccgaggacaccgcggtgtattactgtgtgaaaaatgcgctgaggtttgactactggggtcagggaaccctggtcgccgtctcgagc

SEQ ID NO: 708 - protein, 116 aa, Artificial Sequence
  Synthetic peptide
EVQLLESRGGLVQPGGSLRLSCAASGFTFSTYPMHWVRQAPWKGLEWVSSISPSGDSTHYADSVKGRFTISRDNSKNTLYLQMNSLRAEDTAVYYCVKNALRFDYWGQGTLVAVSS

SEQ ID NO: 709 - DNA, 348 bp, Artificial Sequence
  Synthetic oligonucleotide
gaggtgcagctgttggagtctgggggaggcttggtacagcctggggggtccctgcgtctctcctgtgcagcctccggattcaccttttctacgtatccgatgcattgggtccgccaggctccagggaagggtctagagtgggtctcatcgattagtccgagtggtgattctacatactacgcaaactccgtgaagggccggttcaccatctcccgcgacaattccaagaacacgctgtatctgcaaatgaacagcctgcgtgccgaggacaccgcggtatattactgtgtgaaaaatgcgctgaggtttgactactggggtcagggaaccctggtcaccgtctcgagc

SEQ ID NO: 710 - protein, 116 aa, Artificial Sequence
  Synthetic peptide
EVQLLESGGGLVQPGGSLRLSCAASGFTFSTYPMHWVRQAPGKGLEWVSSISPSGDSTYYANSVKGRFTISRDNSKNTLYLQMNSLRAEDTAVYYCVKNALRFDYWGQGTLVTVSS

SEQ ID NO: 711 - DNA, 348 bp, Artificial Sequence
  Synthetic oligonucleotide
gaggtgcagctgttggagtctgggggaggcttggtacagcctggggggtccctgcgtctctcctgtgcagcctccggtttcaccttttctacgtatccgatgctttgggcccgccaggccccagggaagggtctagagtgggtctcatcgattagtccgagtggtgattctacatactacgcaggctccgtgaagggccggttcaccatctcccgcgacaattccaagaacacgctgtatctgcaaatgaacagcctgcgtgccgaggacaccgcggtatattactgtgcgaaaaatacgctgaggtttgactactggggtcagggaaccctggtcaccgtctcgagc

SEQ ID NO: 712 - protein, 116 aa, Artificial Sequence
  Synthetic peptide
EVQLLESGGGLVQPGGSLRLSCAASGFTFSTYPMLWARQAPGKGLEWVSSISPSGDSTYYAGSVKGRFTISRDNSKNTLYLQMNSLRAEDTAVYYCAKNTLRFDYWGQGTLVTVSS

SEQ ID NO: 713 - DNA, 348 bp, Artificial Sequence
  Synthetic oligonucleotide
gaggtgcagctgttggagtctgggggaggcttggtacagcctggggggtccctgcgtctctcctgtgcagcctccggattcaccttttctacgtatccgatgcattgggtccgccaggctccagggaagggtctagagtgggtctcatcgattagtccgagtggtgattctacatactacgcaggctccgtgaagggccggttcaccatctcccgcgacaattccaagaacacgctgtatctgcaaatgaacagcctgcgtgccgaggacaccgcggtatattactgtgcgaaaaatgcgctgaggtttgactactggggtcagggaaccctggtcaccgtctcgagc

SEQ ID NO: 714 - protein, 116 aa, Artificial Sequence
  Synthetic peptide
EVQLLESGGGLVQPGGSLRLSCAASGFTFSTYPMHWVRQAPGKGLEWVSSISPSGDSTYYAGSVKGRFTISRDNSKNTLYLQMNSLRAEDTAVYYCAKNALRFDYWGQGTLVTVSS

SEQ ID NO: 715 - DNA, 348 bp, Artificial Sequence
  Synthetic oligonucleotide
gaggtgcagctgttggagtctgggggaggcttggtacagcctggggggtccctgcgtctctcctgtgcagcctccggattcaccttttctacgtatccgatgcattgggtccgccaggctccagggaagggtctagagtgggtctcatcgattagtccgagtggtgattctacacactacgcagactccgtgaagggccggttcaccatctcccgcgacaattccaagaacacgctgtatctgcaaatgaacagcctgcgtgccgaggacaccgcggtatattactgtgcgaaaaatgcgctgaggtctgactactggggtcagggaaccctggtcgccgtctcgagc

SEQ ID NO: 716 - protein, 116 aa, Artificial Sequence
  Synthetic peptide
EVQLLESGGGLVQPGGSLRLSCAASGFTFSTYPMHWVRQAPGKGLEWVSSISPSGDSTHYADSVKGRFTISRDNSKNTLYLQMNSLRAEDTAVYYCAKNALRSDYWGQGTLVAVSS

SEQ ID NO: 717 - DNA, 360 bp, Artificial Sequence
  Synthetic oligonucleotide
gaggtgcagctgttggagtctgggggaggcttggtacagcctggggggtccctgcgtctctcctgtgcagcctccggattcacctttgatgattatgagatgggttgggtccgccaggctccagggaagggtctggagtgggtctcattgattagtgctcagggtcgggttacatactacgcagactccgtgaagggccggttcaccatctcccgcgacaattccaagaacacgctgtatctgcaaatgaacagcctgcgtgccgaggataccgcggtatattactgtgcgaaaaattctccttcttatctgttgaattttgactactggggtcagggaaccctggtcaccgtctcgagc

SEQ ID NO: 718 - protein, 120 aa, Artificial Sequence
  Synthetic peptide
EVQLLESGGGLVQPGGSLRLSCAASGFTFDDYEMGWVRQAPGKGLEWVSLISAQGRVTYYADSVKGRFTISRDNSKNTLYLQMNSLRAEDTAVYYCAKNSPSYLLNFDYWGQGTLVTVSS

SEQ ID NO: 719 - DNA, 348 bp, Artificial Sequence
  Synthetic oligonucleotide
gaggtgcagctgttggagtctgggggaggcttggtacagcctggggggtccctgcgtctctcctgtgcagcctccggattcacctttaagcgttatccgatggggtgggtccgccaggctccagggaagggtctggagtgggtctcagcgatttctgatgggggtcttcgtacatactacgcagactccgtgaagggccggttcaccatctcccgcgacaattccaagaacacgctgtatctgcaaatgaacagcctgcgtgccgaggataccgcggtatattactgtgcgaaacggtctaagaattttgactactggggtcagggaaccctggtcaccgtctcgagc

SEQ ID NO: 720 - protein, 116 aa, Artificial Sequence
  Synthetic peptide
EVQLLESGGGLVQPGGSLRLSCAASGFTFKRYPMGWVRQAPGKGLEWVSAISDGGLRTYYADSVKGRFTISRDNSKNTLYLQMNSLRAEDTAVYYCAKRSKNFDYWGQGTLVTVSS

SEQ ID NO: 721 - DNA, 354 bp, Artificial Sequence
  Synthetic oligonucleotide
gaggtgcagctgttggagtctgggggaggcttggtacagcctggggggtccctgcgtctctcctgtgcagcctccggattcacctttgctcggtatgagatggtgtgggtccgccaggctccagggaagggtctagagtgggtctcagctattagtggtagtggtggtagcacatactacgcagactccgtgaagggccggttcaccatctcccgcgacaattccaagaacacgctgtatctgcaaatgaacagcctgcgtgccgaggacaccgcggtatattactgtgcgaaacggacgagggataaggggtttgactactggggtcagggaaccctggtcaccgtctcgagc

SEQ ID NO: 722 - protein, 118 aa, Artificial Sequence
  Synthetic peptide
EVQLLESGGGLVQPGGSLRLSCAASGFTFARYEMVWVRQAPGKGLEWVSAISGSGGSTYYADSVKGRFTISRDNSKNTLYLQMNSLRAEDTAVYYCAKRTRDKGFDYWGQGTLVTVSS

SEQ ID NO: 723 - DNA, 348 bp, Artificial Sequence; identical to SEQ ID NO: 605
  Synthetic oligonucleotide

SEQ ID NO: 724 - protein, 116 aa, Artificial Sequence; identical to SEQ ID NO: 606
  Synthetic peptide

SEQ ID NO: 725 - DNA, 348 bp, Artificial Sequence; identical to SEQ ID NO: 719
  Synthetic oligonucleotide

SEQ ID NO: 726 - protein, 116 aa, Artificial Sequence; identical to SEQ ID NO: 720
  Synthetic peptide

SEQ ID NO: 727 - DNA, 348 bp, Artificial Sequence
  Synthetic oligonucleotide
gaggtgcagctgttggagtctgggggaggcttggtacagcctggggggtccctgcgtctctcctgtgcagcctccggattcaccttttggagttatccgatgtcgtgggtccgccaggctccagggaagggtctagagtgggtctcaagtattagtcctcagggttttcatacatactacgcagactccgtgaagggccggttcaccatctcccgcgacaattccaagaacacgctgtatctgcaaatgaacaacctgcgtgccgaggacaccgcggtatattactgtgcggaaaagattcgtcgttttgactactggggtcagggaaccctggtcaccgtctcgagc

SEQ ID NO: 728 - protein, 116 aa, Artificial Sequence
  Synthetic peptide
EVQLLESGGGLVQPGGSLRLSCAASGFTFWSYPMSWVRQAPGKGLEWVSSISPQGFHTYYADSVKGRFTISRDNSKNTLYLQMNNLRAEDTAVYYCAEKIRRFDYWGQGTLVTVSS

SEQ ID NO: 729 - DNA, 348 bp, Artificial Sequence
  Synthetic oligonucleotide
gaggtgcagctgttggagtctgggggaggcttggtacagcctggggggtccctgcgtctctcctgtgcagcctccggattcacctttactgattcggatatggagtgggtccgccaggctccagggaagggtctagagtgggtctcagttattacggggcatggtggggttacatactacgcagactccgtgaagggccggttcaccatctcccgcgacaattccaagaacacgctgtatctgcaaatgaacagcctgcgtgccgaggacaccgcggtatattactgtgcgaaagcggggactagttttgactactggggtcagggaaccctggtcaccgtctcgagc

SEQ ID NO: 730 - protein, 116 aa, Artificial Sequence
  Synthetic peptide
EVQLLESGGGLVQPGGSLRLSCAASGFTFTDSDMEWVRQAPGKGLEWVSVITGHGGVTYYADSVKGRFTISRDNSKNTLYLQMNSLRAEDTAVYYCAKAGTSFDYWGQGTLVTVSS

SEQ ID NO: 731 - DNA, 348 bp, Artificial Sequence; identical to SEQ ID NO: 627
  Synthetic oligonucleotide

SEQ ID NO: 732 - protein, 116 aa, Artificial Sequence; identical to SEQ ID NO: 628
  Synthetic peptide

SEQ ID NO: 733 - DNA, 348 bp, Artificial Sequence
  Synthetic oligonucleotide
gaggtgcagctgttggagtctgggggaggcttggtacagcctggggggtccctgcgtctctcctgtgcagcctccggattcaccttttctcattatcctatgagttgggtccgccaggctccagggaagggtctagagtgggtctcatctatttctccttcgggtttttttacatactacgcagactccgtgaagggccggttcaccatctcccgcgacaattccaagaacacgctgtatctgcaaatgaacagcctgcgtgccgaggacaccgcggtatattactgtgcgaaagattctcgtctttttgactactggggtcagggaaccctggtcaccgtctcgagc

SEQ ID NO: 734 - protein, 116 aa, Artificial Sequence
  Synthetic peptide
EVQLLESGGGLVQPGGSLRLSCAASGFTFSHYPMSWVRQAPGKGLEWVSSISPSGFFTYYADSVKGRFTISRDNSKNTLYLQMNSLRAEDTAVYYCAKDSRLFDYWGQGTLVTVSS

SEQ ID NO: 735 - DNA, 348 bp, Artificial Sequence; identical to SEQ ID NO: 727
  Synthetic oligonucleotide

SEQ ID NO: 736 - protein, 116 aa, Artificial Sequence; identical to SEQ ID NO: 728
  Synthetic peptide

SEQ ID NO: 737 - DNA, 351 bp, Artificial Sequence
  Synthetic peptide
gaggtgcagctgttggagtctgggggaggcttggtacagcctggggggtccctgcgtctctcctgtgcagcctccggattcacctttagtggtgagactatgggttgggtccgccaggctccagggaagggtctagagtgggtctcagatatttcgagggatggttggaatacatactacgcagactccgtgaagggccggttcaccatctcccgcgacaattccaagaacacgctgtatctgcaaatgaacagcctgcgtgccgaggacaccgcggtatattactgtgcgaaacttgtgaattcggattttgactactggggtcagggaaccctggtcaccgtctcgagc

SEQ ID NO: 738 - protein, 117 aa, Artificial Sequence
  Synthetic peptide
EVQLLESGGGLVQPGGSLRLSCAASGFTFSGETMGWVRQAPGKGLEWVSDISRDGWNTYYADSVKGRFTISRDNSKNTLYLQMNSLRAEDTAVYYCAKLVNSDFDYWGQGTLVTVSS

SEQ ID NO: 739 - DNA, 354 bp, Artificial Sequence
  Synthetic oligonucleotide
gaggtgcagctgttggagtctgggggaggcttggtacagcctggggggtccctgcgtctctcctgtgcagcctccggattcacctttccgaattatattatgtcttgggtccgccaggctccagggaagggtctagagtgggtctcatgtatttctcggatgggtgcttttacatactacgcagactccgtgaagggccggttcaccatctcccgcgacaattccaagaacacgctgtatctgcaaatgaacagcctgcgtgccgaggacaccgcggtatattactgtgcgaaatggaatgagagttctgactttggctactggggacacgtgaccctggtcaccggctcgagc

SEQ ID NO: 740 - protein, 118 aa, Artificial Sequence
  Synthetic peptide
EVQLLESGGGLVQPGGSLRLSCAASGFTFPNYIMSWVRQAPGKGLEWVSCISRMGAFTYYADSVKGRFTISRDNSKNTLYLQMNSLRAEDTAVYYCAKWNESSDFGYWGHVTLVTGSS

SEQ ID NO: 741 - DNA, 348 bp, Artificial Sequence
  Synthetic oligonucleotide
gaggtgcagctgttggagtctgggggaggcttggtacagcctggggggtccctgcgtctctcctgtgcagcctccggattcacctttactgatgcggatatggagtgggtccgccaggctccagggaagggtctagagtgggtctcagttattacggcgcagggtggggatacatactacgcagactccgtgaagggccggttcaccatctcccgcgacaattccaagaacacgctgtatctgcaaatgaacagcctgcgtgccgaggacaccgcggtatattactgtgcgaaagcggggactagttttgactactggggtcagggaaccctggtcaccgtctcgagc

SEQ ID NO: 742 - protein, 116 aa, Artificial Sequence
  Synthetic peptide
EVQLLESGGGLVQPGGSLRLSCAASGFTFTDADMEWVRQAPGKGLEWVSVITAQGGDTYYADSVKGRFTISRDNSKNTLYLQMNSLRAEDTAVYYCAKAGTSFDYWGQGTLVTVSS

SEQ ID NO: 743 - DNA, 348 bp, Artificial Sequence
  Synthetic oligonucleotide
gaggtgcagctgttggagtctgggggaggcttggtacagcctggggggtccctgcgtctctcctgtgcagcctccggattcacctttccgagttatattatggtttgggtccgccaggctccagggaagggtctggagtgggtctcatctatttctgcgtcgggtcagtatacatactacgcagactccgtgaagggccggttcaccatctcccgcgacaattccaagaacacgctgtatctgcaaatgaacagcctgcatgccgaggacaccgcggtatattactgtgcgaaatgggtgtcgggttttgactactggggtcagggaaccctggtcaccgtctcgagc

SEQ ID NO: 744 - protein, 116 aa, Artificial Sequence
  Synthetic peptide
EVQLLESGGGLVQPGGSLRLSCAASGFTFPSYIMVWVRQAPGKGLEWVSSISASGQYTYYADSVKGRFTISRDNSKNTLYLQMNSLHAEDTAVYYCAKWVSGFDYWGQGTLVTVSS

SEQ ID NO: 745 - DNA, 324 bp, Artificial Sequence
  Synthetic oligonucleotide
gacatccagatgacccagtctccatcctccctgtctgcatctgtaggagaccgtgtcaccatcacttgccgggcaagtcagccgattaaggataggttaagttggtatcagcagaaaccagggaaagcccctaagctcctgatctataggacttccattttgcaaagtggggtcccatcacgtttcagtggcagtggatctgggacagatttcactctcaccatcagcagtctgcaacctgaagattttgctacgtactactgtcaacagtatcagaggtggcctaatacgttcggccaagggaccaaggtggaaatcaaacgg

SEQ ID NO: 746 - protein, 108 aa, Artificial Sequence
  Synthetic peptide
DIQMTQSPSSLSASVGDRVTITCRASQPIKDRLSWYQQKPGKAPKLLIYRTSILQSGVPSRFSGSGSGTDFTLTISSLQPEDFATYYCQQYQRWPNTFGQGTKVEIKR

SEQ ID NO: 747 - DNA, 324 bp, Artificial Sequence
  Synthetic oligonucleotide
gacatccagatgacccagtctccatcctccctgtctgcatctgtaggagaccgtgtcaccatcacttgccgggcaagtcgtaatattcatggtaagttaggttggtaccagcagaaaccagggaaagcccctgagctcctgatctggggtgcttcccgtttgcaaagtggggtcccatcacgtttcagtggcagtggatctgggacagatttcactctcaccatcagcagtctgcaacctgaagattttgctacgtactactgtgggcaggttgcgtcgcggcctggtacgttcggccaagggaccaaggtggaaatcaaacgg

SEQ ID NO: 748 - protein, 108 aa, Artificial Sequence
  Synthetic peptide
DIQMTQSPSSLSASVGDRVTITCRASRNIHGKLGWYQQKPGKAPELLIWGASRLQSGVPSRFSGSGSGTDFTLTISSLQPEDFATYYCGQVASRPGTFGQGTKVEIKR

SEQ ID NO: 749 - DNA, 324 bp, Artificial Sequence
  Synthetic oligonucleotide
gacatccagatgacccagtctccatcctccctgtctgcatctgtaggagaccgtgtcaccatcacttgccgggcaagtcagcgtatttatcagaatttactgtggtaccagcagaaaccagggaaagcccctaagctcctgatctataataggtccattttgcaaagtggggtcccatcacgtttcagtggcagtggatctgggacagatttcactctcaccatcagcagtctgcaacctgaagattttgctacgtactactgtcaacagttgcagttttatccttttacgttcggccaagggaccaaggtggaaatcaaacgg

SEQ ID NO: 750 - protein, 108 aa, Artificial Sequence
  Synthetic peptide
DIQMTQSPSSLSASVGDRVTITCRASQRIYQNLLWYQQKPGKAPKLLIYNRSILQSGVPSRFSGSGSGTDFTLTISSLQPEDFATYYCQQLQFYPFTFGQGTKVEIKR

SEQ ID NO: 751 - DNA, 324 bp, Artificial Sequence
  Synthetic oligonucleotide
gacatccagatgacccagtctccatcctccctgtctgcatctgtaggagaccgtgtcaccatcacttgccgggcaagtcagaatatttatccttatttaatgtggtatcagcagaaaccagggaaagcccctaagctcctgatctatggggggtcctggttgcaaagtggggtcccatcacgtttcagtggcagtggatctgggacagatttcactctcaccatcagcagtctgcaacctgaagattttgctacgtactactgtcaacagacggttaagtggcctcatacgttcggccaagggaccaaggtggaaatcaaacgg

SEQ ID NO: 752 - protein, 108 aa, Artificial Sequence
  Synthetic peptide
DIQMTQSPSSLSASVGDRVTITCRASQNIYPYLMWYQQKPGKAPKLLIYGGSWLQSGVPSRFSGSGSGTDFTLTISSLQPEDFATYYCQQTVKWPHTFGQGTKVEIKR

SEQ ID NO: 753 - DNA, 324 bp, Artificial Sequence
  Synthetic oligonucleotide
gacatccagatgacccagtctccatcctccctgtctgcatctgtaggagaccgtgtcaccatcacttgccgggcaagtcaggatatttcggatgctttaaattggtatcagcagaaaccagggaaagcccctaagctcctgatctatgatgtgtcctatttgcaaagtggggtcccatcacgttttagtggcagtggatctgggacagatttcactctcaccatcagcagtctgcaacctgaagattttgctacgtactactgtcaacagagtcattcgtttcctgctacgttcggccaagggaccaaggtggaaatcaaacgg

SEQ ID NO: 754 - protein, 108 aa, Artificial Sequence
  Synthetic peptide
DIQMTQSPSSLSASVGDRVTITCRASQDISDALNWYQQKPGKAPKLLIYDVSYLQSGVPSRFSGSGSGTDFTLTISSLQPEDFATYYCQQSHSFPATFGQGTKVEIKR

SEQ ID NO: 755 - DNA, 324 bp, Artificial Sequence
  Synthetic oligonucleotide
gacatccagatgacccagtctccatcctccctgtctgcatctgtaggagaccgtgtcaccatcacttgccgggcgagtcagaagattggtccttatttaatgtggtatcagcagaaaccagggaaagcccctaagctcctgatctatcattattccactttgcaaagtggggtcccatcacgtttcagtggcagtggatctgggacagatttcactctcaccatcagcagtctgcaacctgaagattttgctacgtactactgtcaacagacggttaagtggcctcatacgttcggccaagggaccaaggtggaaatcaaacgg

SEQ ID NO: 756 - protein, 108 aa, Artificial Sequence
  Synthetic peptide
DIQMTQSPSSLSASVGDRVTITCRASQKIGPYLMWYQQKPGKAPKLLIYHYSTLQSGVPSRFSGSGSGTDFTLTISSLQPEDFATYYCQQTVKWPHTFGQGTKVEIKR

SEQ ID NO: 757 - DNA, 324 bp, Artificial Sequence
  Synthetic oligonucleotide
gacatccagatgacccagtctccatcctccctgtctgcatctgtaggagaccgtgtcaccatcacttgccgggcaagtcagcagattcgtgatgcgttatcgtggtaccagcagaaaccagggaaagcccctaagctcctgatctattatacttccattttgcaaaatggggtcccatcacgtttcagtggcagtggatctgggacggatttcactctcaccatcagcagtctgcaacctgaagattttgctacgtactactgtcaacagaattatttgtttcctgctacgttcggccaagggaccaaggtggaaatcaaacgg

SEQ ID NO: 758 - protein, 108 aa, Artificial Sequence
  Synthetic peptide
DIQMTQSPSSLSASVGDRVTITCRASQQIRDALSWYQQKPGKAPKLLIYYTSILQNGVPSRFSGSGSGTDFTLTISSLQPEDFATYYCQQNYLFPATFGQGTKVEIKR

SEQ ID NO: 759 - DNA, 324 bp, Artificial Sequence
  Synthetic oligonucleotide
gacatccagatgacccagtctccatcctccctgtctgcatctgtaggagacagagtcaccatcacttgccgggcaagtcagagcgttagcagctatttaaattggtatcagcagaaaccagggaaagcccctaagctcctgatctatcttgcatcccgtttgcaaagtggggtcccatcaaggttcagtggcagtggatctgggacagatttcactctcaccatcagcagtctgcaacctgaagattttgcaacttactactgtcaacagaattggtggctgcctcctacgttcggccaagggaccaaggtggaaatcaaacgg

SEQ ID NO: 760 - protein, 108 aa, Artificial Sequence
  Synthetic peptide
DIQMTQSPSSLSASVGDRVTITCRASQSVSSYLNWYQQKPGKAPKLLIYLASRLQSGVPSRFSGSGSGTDFTLTISSLQPEDFATYYCQQNWWLPPTFGQGTKVEIKR

SEQ ID NO: 761 - DNA, 324 bp, Artificial Sequence
  Synthetic oligonucleotide
gacatccagatgacccagtctccatcctccctgtctgcatctgtaggagacagagtcaccatcacttgccgggcaagtcagagcgttagcagctatttaaattggtatcagcagaaaccagggaaagcccctaagctcctgatctatcttgcatcccgtttgcaaagtggggtcccatcaaggttcagtggcagtggatctgggacagatttcactctcaccatcagcagtctgcaacctgaagattttgctacgtactactgtgggcagaagtgggctaggcctctgacgttcggccaagggaccaaggtggaaatcaagcgg

SEQ ID NO: 762 - protein, 108 aa, Artificial Sequence
  Synthetic peptide
DIQMTQSPSSLSASVGDRVTITCRASQSVSSYLNWYQQKPGKAPKLLIYLASRLQSGVPSRFSGSGSGTDFTLTISSLQPEDFATYYCGQKWARPLTFGQGTKVEIKR

SEQ ID NO: 763 - DNA, 324 bp, Artificial Sequence
  Synthetic oligonucleotide
gacatccagatgacccagtctccatcctccctgtctgcatctgtaggagacagagtcaccatcacttgccgggcaagtcagagcgttagcagctattcaaattggtatcagcagaaaccagggaaagcccctaagctcctgatctatcttgcatcccgtttgcaaagtggggtcccatcaaggttcagtggcagtggatctgggacagatttcactctcaccatcagcagtctgcaacctgaagattttgcaacttactactgtcaacagaattggtggctgcctcctacgttcggccaagggaccaaggtggaaatcaaacgg

SEQ ID NO: 764 - protein, 108 aa, Artificial Sequence
  Synthetic peptide
DIQMTQSPSSLSASVGDRVTITCRASQSVSSYSNWYQQKPGKAPKLLIYLASRLQSGVPSRFSGSGSGTDFTLTISSLQPEDFATYYCQQNWWLPPTFGQGTKVEIKR

SEQ ID NO: 765 - DNA, 324 bp, Artificial Sequence
  Synthetic oligonucleotide
gacatccagatgacccagtctccatcctccctgtctgcatctgtaggagaccgtgtcaccatcacttgccgggcaagtcagaatattcagcattatttaacgtggtatcagcagaaaccagggaaagcccctaagctcctgatctataaggcttcctttttgcaaagtggggtcccatcacgtttcagtggcagtggatctggaacagatttcactctcaccatcagcagtctgcaacctgaagattttgctacgtactactgtcaacagacgtggacgatgcctttgacgttcggccaagggaccaaggtggaaatcaaacgg

SEQ ID NO: 766 - protein, 108 aa, Artificial Sequence
  Synthetic peptide
DIQMTQSPSSLSASVGDRVTITCRASQNIQHYLTWYQQKPGKAPKLLIYKASFLQSGVPSRFSGSGSGTDFTLTISSLQPEDFATYYCQQTWTMPLTFGQGTKVEIKR

SEQ ID NO: 767 - DNA, 324 bp, Artificial Sequence
  Synthetic oligonucleotide
gacatccagatgacccagtctccatcctccctgtctgcatctgtaggagaccgtgtcaccatcacttgccgggcaagtcagtatattggtattgatttatcttggtaccagcagaaaccagggaaagcccctaagctcctgatctgggaggggtccgggttgcaaagtggggtcccatcacgtttcagtggcagtggatctgggacagatttcactctcaccatcagcagtctgcaacctgaagattttgctacgtactactgtgggcagattaggtttcggccttttacgttcggccaagggaccaaggtggaaatcaaacgg

SEQ ID NO: 768 - protein, 108 aa, Artificial Sequence
  Synthetic peptide
DIQMTQSPSSLSASVGDRVTITCRASQYIGIDLSWYQQKPGKAPKLLIWEGSGLQSGVPSRFSGSGSGTDFTLTISSLQPEDFATYYCGQIRFRPFTFGQGTKVEIKR

SEQ ID NO: 769 - DNA, 324 bp, Artificial Sequence
  Synthetic oligonucleotide
gacatccagatgacccagtctccatcctccctgtctgcatctgtaggagaccgtgtcaccatcacttgccgggcaagtcagtatattagtactaatttactgtggtaccagcagaaaccagggaaagcccctaagctcctgatccgttcggggtccgggttgcaaagtggggtcccatcacgtttcagtggcagtggatctgggacagatttcactctcaccatcagcagtctgcaacctgaagattttgctacgtactactgtcgtcaggttgagtatatgccttatacgttcggccaagggaccaaggtggaaatcaaacgg

SEQ ID NO: 770 - protein, 108 aa, Artificial Sequence
  Synthetic peptide
DIQMTQSPSSLSASVGDRVTITCRASQYISTNLLWYQQKPGKAPKLLIRSGSGLQSGVPSRFSGSGSGTDFTLTISSLQPEDFATYYCRQVEYMPYTFGQGTKVEIKR

SEQ ID NO: 771 - DNA, 324 bp, Artificial Sequence
  Synthetic oligonucleotide
gacatccagatgacccagtctccatcctccctgtctgcatctgtaggagaccgtgtcaccatcacttgccgggcaagtcagcagattcgtgatgggttattgtggtaccagcagaaaccagggaaagcccctaagctcctgatctattatacttccattttgcaaaatggggtcccatcacgtttcagtggcagtggatctgggacggatttcactctcaccatcagcagtctgcaacctgaagattttgctacgtactactgtcaacagaattatttgtttcctgctacgttcggccaagggaccaaggtggaaatcaaacgg

SEQ ID NO: 772 - protein, 108 aa, Artificial Sequence
  Synthetic peptide
DIQMTQSPSSLSASVGDRVTITCRASQQIRDGLLWYQQKPGKAPKLLIYYTSILQNGVPSRFSGSGSGTDFTLTISSLQPEDFATYYCQQNYLFPATFGQGTKVEIKR

SEQ ID NO: 773 - DNA, 324 bp, Artificial Sequence
  Synthetic oligonucleotide
gacatccagatgacccagtctccatcctccctgtctgcatctgtaggagaccgtgtcaccatcacttgccgggcaagtaagtatattggtagtgatttatattggtaccagcagaaaccaggtaaagcccctaagctcctgatcgggggggggtcccgtttgcaaagtggggtctcatcacgtttcagtggcagtggatctgggacagatttcactctcaccatcagcagtctgcaacctgaagattttgctacgtactactgtgggcagaagtgggctaggcctctgacgttcggccaagggaccaaggtggaaatcaaacgg

SEQ ID NO: 774 - protein, 108 aa, Artificial Sequence
  Synthetic peptide
DIQMTQSPSSLSASVGDRVTITCRASKYIGSDLYWYQQKPGKAPKLLIGGGSRLQSGVSSRFSGSGSGTDFTLTISSLQPEDFATYYCGQKWARPLTFGQGTKVEIKR

SEQ ID NO: 775 - DNA, 324 bp, Artificial Sequence
  Synthetic oligonucleotide
gacatccagatgaccccgtctccatcctcccggtctgcatctgtaggagaccgtgtcaccatcacttgccgggcaagtaagtatattggtagtgatttatattggtaccagcagaaaccaggtaaagcccctaagctcctgatcgggggggggtcccgtttgcaaagtggggtctcatcacgtttcagtggcagtggatctgggacagatttcactctcaccatcagcagtctgcaacctgaagattttgctacgtactactgtgggcagaagtgggctaggcctctgacgttcggccaagggaccaaggtggaaatcaaacgg

SEQ ID NO: 776 - protein, 108 aa, Artificial Sequence
  Synthetic peptide
DIQMTPSPSSRSASVGDRVTITCRASKYIGSDLYWYQQKPGKAPKLLIGGGSRLQSGVSSRFSGSGSGTDFTLTISSLQPEDFATYYCGQKWARPLTFGQGTKVEIKR

SEQ ID NO: 777 - DNA, 324 bp, Artificial Sequence
  Synthetic oligonucleotide
gacatccagatgacccagtcaccatcctccctgtctgcatctgtaggagaccgtgtcaccatcacttgccgggcaagtaagtatattggtagtgatttatattggtaccagcagaaaccaggtaaagcccctaagctcctgatcgggagggggtcccgtttgcaaagtggggtctcatcacgtttcagtggcagtggatctgggacagatttcactctcaccatcagcagtctgcaacctgaagattttgctacgtactactgtgggcagaagtgggctaggcctctgacgttcggccaagggaccaaggtggaaatcaaacgg

SEQ ID NO: 778 - protein, 108 aa, Artificial Sequence
  Synthetic peptide
DIQMTQSPSSLSASVGDRVTITCRASKYIGSDLYWYQQKPGKAPKLLIGRGSRLQSGVSSRFSGSGSGTDFTLTISSLQPEDFATYYCGQKWARPLTFGQGTKVEIKR

SEQ ID NO: 779 - DNA, 324 bp, Artificial Sequence
  Synthetic oligonucleotide
gacatccagatgacccagtctccatcctccctgtctgcatctgtaggagaccgtgtcaccatcacttgccgggcaagtaagtatattggtagtgatttatattggtaccagcagaaaccaggtaaagcccctaagctcctgatcggaggggggtcccgtttgcaaagtggggtctcatcacgtttcagtggcagtggatctgggacaaatttcactctcaccatcagcagtctgcaacctgaagattttgctgcgtactactgtgggcagaagtgggctaggcctctgacgttcggccaagggaccagggtggaaatcaagcgg

SEQ ID NO: 780 - protein, 108 aa, Artificial Sequence
  Synthetic peptide
DIQMTQSPSSLSASVGDRVTITCRASKYIGSDLYWYQQKPGKAPKLLIGGGSRLQSGVSSRFSGSGSGTNFTLTISSLQPEDFAAYYCGQKWARPLTFGQGTRVEIKR

SEQ ID NO: 781 - DNA, 324 bp, Artificial Sequence
  Synthetic oligonucleotide
gacatccagatgacccagactccatcctccctgtctgcatctgtaggagaccgtgccaccatcacttgccgggcaagtaagtatattggtagtgatttatattggtaccagcagaaaccaggtaaagcccctaagctcctgatcgggggggggtcccgtttgcaaagtggggtctcatcacgtttcagtggcagtggatctgggacagatttcactctcaccatcagcagtctgcaacctgaagattttgctgcgtactactgtgggcagaagtgggctaggcctctgacgttcggccaagggaccagggtggaaatcaaacgg

SEQ ID NO: 782 - protein, 108 aa, Artificial Sequence
  Synthetic peptide
DIQMTQTPSSLSASVGDRATITCRASKYIGSDLYWYQQKPGKAPKLLIGGGSRLQSGVSSRFSGSGSGTDFTLTISSLQPEDFAAYYCGQKWARPLTFGQGTRVEIKR

SEQ ID NO: 783 - DNA, 324 bp, Artificial Sequence
  Synthetic oligonucleotide
gacatccagatgacccagtccccatcctccctgtctgcatctgtaggagaccgtgtcaccatcacttgccgggcaagtaagtatattggtagtgatttatattggtaccaacagaaaccaggtaaagcccctaagctcctgatcggggtggggtcccgtttgcaaagtggggtctcatcacgtttcagtggcagtggatctgggacagatttcactctcaccatcagcagtctgcaacctgaagattttgctacgtactactgtgggcagaagtgggctaggcctctgacgttcggccaagggaccagggtggaaatcaaacgg

SEQ ID NO: 784 - protein, 108 aa, Artificial Sequence
  Synthetic peptide
DIQMTQSPSSLSASVGDRVTITCRASKYIGSDLYWYQQKPGKAPKLLIGVGSRLQSGVSSRFSGSGSGTDFTLTISSLQPEDFATYYCGQKWARPLTFGQGTRVEIKR

SEQ ID NO: 785 - DNA, 324 bp, Artificial Sequence
  Synthetic oligonucleotide
gacatccagatgacccagtctccatcctccctgtctgcatctgtaggagaccgtgtcaccatcacttgccgggcaagtaagtatattggtagtgatttatattggtaccagcagaaaccaggtaaagcccctaagctcctgatcggggtggggtcccgtttgcaaagtggggtctcatcacgtttcagtggcagtggatctgggacagatttcactctcaccatcagcagtctgcaacctgaagattttgctacgtactactgtgggcagaagtgggctaggcctctgacgttcggccaagggatcaaggtggaaatcaaacgg

SEQ ID NO: 786 - protein, 108 aa, Artificial Sequence
  Synthetic peptide
DIQMTQSPSSLSASVGDRVTITCRASKYIGSDLYWYQQKPGKAPKLLIGVGSRLQSGVSSRFSGSGSGTDFTLTISSLQPEDFATYYCGQKWARPLTFGQGIKVEIKR

SEQ ID NO: 787 - DNA, 324 bp, Artificial Sequence
  Synthetic oligonucleotide
gacatccagatgacccagtctccatcctccctgtctgcatctgtaggagaccgtgtcaccatcacttgccgggcaagtcagccgattgggatgactttatcttggtaccagcagaaaccagggaaagcccctaagctcctgatctatgaggtttccaagttgcaaagtggggtcccatcacgtttcagtggcagtggatctgggacagatttcactctcaccatcagcagtctgcaacctgaagattttgctacgtactactgtcaacagattaggtttcggccttttacgtacggccaagggaccaaggtggaaatcaaacgg

SEQ ID NO: 788 - protein, 108 aa, Artificial Sequence
  Synthetic peptide
DIQMTQSPSSLSASVGDRVTITCRASQPIGMTLSWYQQKPGKAPKLLIYEVSKLQSGVPSRFSGSGSGTDFTLTISSLQPEDFATYYCQQIRFRPFTYGQGTKVEIKR

SEQ ID NO: 789 - DNA, 324 bp, Artificial Sequence
  Synthetic oligonucleotide
gacatccagatgacccagtctccatcctccctgtctgcatctgtaggagaccgtgtcaccattacttgccgggcaagtcggcatattgggtctgatttatattggtaccagcagaaaccagggaaagcccctaagctcctgatcagggaggggtcctggttgcaaagtggggtcccatcacgtttcagtggcagtggatctgggacagatttcactctcaccatcagcagtctgcaacctgaagattttgctacgtactactgtggtcagcatcggtcgcatcctgctacgttcggccaagggaccaaggtggaaatcaaacgg

SEQ ID NO: 790 - protein, 108 aa, Artificial Sequence
  Synthetic peptide
DIQMTQSPSSLSASVGDRVTITCRASRHIGSDLYWYQQKPGKAPKLLIREGSWLQSGVPSRFSGSGSGTDFTLTISSLQPEDFATYYCGQHRSHPATFGQGTKVEIKR

SEQ ID NO: 791 - DNA, 324 bp, Artificial Sequence
  Synthetic oligonucleotide
gacatccagatgacccagtctccatcctccctgtctgcatctgtaggagatcgtgtcaccatcacttgccgggcaagtcagtggatttctgataatttaagttggtaccagcagaaaccagggaaagcccctaagctcctgatccatagggtgtcccgtttgcaaagtggggtcccatcacgtttcagtggcagtggatctgggacagatttcactctcaccatcagcagtctgcaacctgaagattttgctacgtactactgtcaacagtattggtattggcctcctacgttcggccaagggaccaaggtggaaatcaaacgg

SEQ ID NO: 792 - protein, 108 aa, Artificial Sequence
  Synthetic peptide
DIQMTQSPSSLSASVGDRVTITCRASQWISDNLSWYQQKPGKAPKLLIHRVSRLQSGVPSRFSGSGSGTDFTLTISSLQPEDFATYYCQQYWYWPPTFGQGTKVEIKR

SEQ ID NO: 793 - DNA, 324 bp, Artificial Sequence
  Synthetic oligonucleotide
gacatccagatgacccagtctccatcctccttgtctgcatctgtaggagaccgtgtcaccatcacttgccgggcaagtcagcatattcgtcagtatttagattggtaccagcagaaaccagggaaagcccctaagctcctgatctatcattcttccaggttgcaaagtggggtcccatcacgtttcagtggcagtggatctgggacagatttcactctcaccatcagcagtctgcaacctgaagattttgctacgtactactgtcaacagtatagtgattggcctcctacgttcggccaagggaccaaggtggaaatcaaacgg

SEQ ID NO: 794 - protein, 108 aa, Artificial Sequence
  Synthetic peptide
DIQMTQSPSSLSASVGDRVTITCRASQHIRQYLDWYQQKPGKAPKLLIYHSSRLQSGVPSRFSGSGSGTDFTLTISSLQPEDFATYYCQQYSDWPPTFGQGTKVEIKR

SEQ ID NO: 795 - DNA, 324 bp, Artificial Sequence
  Synthetic oligonucleotide
gacatccagatgacccagtctccatcctccctgtctgcatctgtaggagaccgtgtcaccatcacttgccgggcaagtcagggtattaatgggcgtttaaattggtaccagcagaaaccagggaaagcccctacgctcctgatctatgaggcttccaagttgcaaagtggggtcccatcacgtttcagtggcagtggatctgggacagatttcactctcaccatcagcagtctgcaacctgaagattgtgctacgtactactgtcaacagtctatgggtcgtcctgctacgttcggccaagggaccaaggtggaaatcaaacgg

SEQ ID NO: 796 - protein, 108 aa, Artificial Sequence
  Synthetic peptide
DIQMTQSPSSLSASVGDRVTITCRASQGINGRLNWYQQKPGKAPTLLIYEASKLQSGVPSRFSGSGSGTDFTLTISSLQPEDCATYYCQQSMGRPATFGQGTKVEIKR

SEQ ID NO: 797 - DNA, 324 bp, Artificial Sequence; identical to SEQ ID NO: 757
  Synthetic oligonucleotide

SEQ ID NO: 798 - protein, 108 aa, Artificial Sequence; identical to SEQ ID NO: 758
  Synthetic peptide

SEQ ID NO: 799 - DNA, 324 bp, Artificial Sequence
  Synthetic oligonucleotide
gacatccagatgacccagtctccatcctccctgtctgcatctgtaggagaccgtgtcaccatcacttgccgggcaagtattagtatttatgagcatttaaattggtaccagcagaaaccagggaaagcccctacgctcctgatctgggattcttccgggttgcaaagtggggtcccatcacgtttcagtggcagtggatctgggacagatttcactctcaccatcagcagtctgcaacctgaagattttgctacgtactactgtgtgcagcatcatagtcatcctcctacgttcggccaagggaccaaggtggaaatcaaacgg

SEQ ID NO: 800 - protein, 108 aa, Artificial Sequence
  Synthetic peptide
DIQMTQSPSSLSASVGDRVTITCRASISIYEHLNWYQQKPGKAPTLLIWDSSGLQSGVPSRFSGSGSGTDFTLTISSLQPEDFATYYCVQHHSHPPTFGQGTKVEIKR

SEQ ID NO: 801 - DNA, 324 bp, Artificial Sequence
  Synthetic oligonucleotide
gacatccagatgacccagtctccatcctccctgtctgcatctgtaggagaccgtgtcaccatcacttgcaggggtcgtattagtatttatgagcatttaaattggtaccagcagaaaccagggaaagcccctacgctcctgatctgggattcttccgggttgcaaagtggggtcccatcacgtttcagtggcagtggatctgggacagatttcactctcaccatcagcagtctgcaacctgaagattttgctacgtactactgtgtgcagcatcatagtcatcctcctacgttcggccaagggaccaaggtggaaatcaaacgg

SEQ ID NO: 802 - protein, 108 aa, Artificial Sequence
  Synthetic peptide
DIQMTQSPSSLSASVGDRVTITCRGRISIYEHLNWYQQKPGKAPTLLIWDSSGLQSGVPSRFSGSGSGTDFTLTISSLQPEDFATYYCVQHHSHPPTFGQGTKVEIKR

SEQ ID NO: 803 - DNA, 324 bp, Artificial Sequence
  Synthetic oligonucleotide
gacatccagatgacccagtctccatcctccctgtctgcatctgtaggagaccgtgtcaccatcacttgccgggcaagtattagtatttatgagcatttaaattggtaccagcagaaaccagggaaagcccctacgctcctgatctgggattcttccgggttgcaaagtggggtcccatcacgtttcagtggcagtggatctgggacagatttcactctcaccatcagcagtctgcaacctgaagattttgctacgtactactgtgtgcagcatcagtctcagccgaatacgttcggccaagggaccaaggtggaaatcaaacgg

SEQ ID NO: 804 - protein, 108 aa, Artificial Sequence
  Synthetic peptide
DIQMTQSPSSLSASVGDRVTITCRASISIYEHLNWYQQKPGKAPTLLIWDSSGLQSGVPSRFSGSGSGTDFTLTISSLQPEDFATYYCVQHQSQPNTFGQGTKVEIKR

SEQ ID NO: 805 - DNA, 324 bp, Artificial Sequence
  Synthetic oligonucleotide
gacatccagatgacccagtctccatcctccctgtctgcatctgtaggagaccgtgtcaccatcacttgccgggcaagtattagtatttatgagcatttaaattggtaccagcagaaaccagggaaagcccctacgctcctgatctgggattcttccgggttgcaaagtggggtcccatcacgtttcagtggcagtggatctgggacagatttcactctcaccatcagcagtctgcaacctgaagattttgctacgtactactgtgtgcagcatcagagtcatcctaatacgttcggccaagggaccaaggtggaaatcaaacgg

SEQ ID NO: 806 - protein, 108 aa, Artificial Sequence
  Synthetic peptide
DIQMTQSPSSLSASVGDRVTITCRASISIYEHLNWYQQKPGKAPTLLIWDSSGLQSGVPSRFSGSGSGTDFTLTISSLQPEDFATYYCVQHQSHPNTFGQGTKVEIKR

SEQ ID NO: 807 - DNA, 324 bp, Artificial Sequence
  Synthetic oligonucleotide
gacatccagatgacccagtctccatcctccctgtctgcatctgtaggagaccgtgtcaccatcacttgccgggcaagtattagtatttatgagcatttaaattggtaccagcagaaaccagggaaagcccctacgctcctgatctgggattcttccgggttgcaaagtggggtcccatcacgtttcagtggcagtggatctgggacagatttcactctcaccatcagcagtctgcaacctgaagattttgctacgtactactgtgttcagcagcatagtcatccgaatacgttcggccaagggaccaaggtggaaatcaaacgg

SEQ ID NO: 808 - protein, 108 aa, Artificial Sequence
  Synthetic peptide
DIQMTQSPSSLSASVGDRVTITCRASISIYEHLNWYQQKPGKAPTLLIWDSSGLQSGVPSRFSGSGSGTDFTLTISSLQPEDFATYYCVQQHSHPNTFGQGTKVEIKR

SEQ ID NO: 809 - DNA, 324 bp, Artificial Sequence
  Synthetic oligonucleotide
gacatccagatgacccagtctccatcctccctgtctgcatctgtaggagaccgtgtcaccatcacttgccgggcaagtattagtatttatgagcatttaaattggtaccagcagaaaccagggaaagcccctacgctcctgatctgggattcttccgggttgcaaagtggggtcccatcacgtttcagtggcagtggatctgggacagatttcactctcaccatcagcagtctgcagcctgaagattttgctacgtactactgtgttcatcagcataggcatcagaatacgttcggccaagggaccaaggtggaaatcaaacgg

SEQ ID NO: 810 - protein, 108 aa, Artificial Sequence
  Synthetic peptide
DIQMTQSPSSLSASVGDRVTITCRASISIYEHLNWYQQKPGKAPTLLIWDSSGLQSGVPSRFSGSGSGTDFTLTISSLQPEDFATYYCVHQHRHQNTFGQGTKVEIKR

SEQ ID NO: 811 - DNA, 324 bp, Artificial Sequence
  Synthetic oligonucleotide
gacatccagatgacccagtctccatcctccctgtctgcatctgtaggagaccgtgtcaccatcacttgccgggcaagtattagtatttatgagcatttaaattggtaccagcagaaaccagggaaagcccctacgctcctgatctgggattcttccgggttgcaaagtggggtcccatcacgtttcagtggcagtggatctgggacagatttcactctcaccatcagcagtctgcaacctgaagattttgctacgtactactgtattcatcggcataatcagccgaatacgttcggccaagggaccaaggtggaaatcaaacgg

SEQ ID NO: 812 - protein, 108 aa, Artificial Sequence
  Synthetic peptide
DIQMTQSPSSLSASVGDRVTITCRASISIYEHLNWYQQKPGKAPTLLIWDSSGLQSGVPSRFSGSGSGTDFTLTISSLQPEDFATYYCIHRHNQPNTFGQGTKVEIKR

SEQ ID NO: 813 - DNA, 324 bp, Artificial Sequence
  Synthetic oligonucleotide
gacatccagatgacccagtctccatcctccctgtctgcatctgtaggagaccgtgtcaccatcacttgccgggcaagtcagggtattgctaagagtttaatgtggtaccagcagaaaccagggaaagcccctaagctcctgatctataagagttccatgttgcaaagtggggtcccatcacgtttcagtggcagtggatctgggacagatttcactctcaccatcagcagtctgcaacctgaagattttgctacgtactactgtcaacaggtttatactatgcctcttacgttcggccaagggaccaaggtggaaatcaaacgg

SEQ ID NO: 814 - protein, 108 aa, Artificial Sequence
  Synthetic peptide
DIQMTQSPSSLSASVGDRVTITCRASQGIAKSLMWYQQKPGKAPKLLIYKSSMLQSGVPSRFSGSGSGTDFTLTISSLQPEDFATYYCQQVYTMPLTFGQGTKVEIKR

SEQ ID NO: 815 - DNA, 324 bp, Artificial Sequence; identical to SEQ ID NO: 769
  Synthetic oligonucleotide

SEQ ID NO: 816 - protein, 108 aa, Artificial Sequence; identical to SEQ ID NO: 770
  Synthetic peptide

SEQ ID NO: 817 - DNA, 324 bp, Artificial Sequence
  Synthetic oligonucleotide
gacatccagatgacccagtctccatcctccctgtctgcatctgtaggagaccgtgtcaccatcacttgccgggcaagtttgaatattgatactgatttagtgtggtaccagcagaaaccagggaaagcccctaagctcctgatcgcggggtggtccgggttgcaaagtggggtcccatcacgtttcagtggcagtggatctgggacagatttcactctcaccatcagcagtctgcaacctgaagattttgctacgtactattgtggtcagtttgcgcgggagccttttacgttcggccaagggaccaaggtggaaatcaaacgg

SEQ ID NO: 818 - protein, 108 aa, Artificial Sequence
  Synthetic peptide
DIQMTQSPSSLSASVGDRVTITCRASLNIDTDLVWYQQKPGKAPKLLIAGWSGLQSGVPSRFSGSGSGTDFTLTISSLQPEDFATYYCGQFAREPFTFGQGTKVEIKR

SEQ ID NO: 819 - DNA, 324 bp, Artificial Sequence
  Synthetic oligonucleotide
gacatccagatgacccagtctccatcctccctgtctgcatctgtaggagaccgtgtcaccatcacttgccaggcaagtcagaatattaatgggaatttacattggtatcagcagaaaccagggaaagcccctaagctcctgatctatgaggtgtccaagttgcaaagtggggtcccatcacgtttcagtggcagtggatctgggacagatttcactctcaccatcagcagtctgcaacctgaagattttgctacgtactactgtcaacagacttatgtgcggcctactacgttcggccaagggaccaaggtggaaatcaaacgg

SEQ ID NO: 820 - protein, 108 aa, Artificial Sequence
  Synthetic peptide
DIQMTQSPSSLSASVGDRVTITCQASQNINGNLHWYQQKPGKAPKLLIYEVSKLQSGVPSRFSGSGSGTDFTLTISSLQPEDFATYYCQQTYVRPTTFGQGTKVEIKR

SEQ ID NO: 821 - DNA, 324 bp, Artificial Sequence; identical to SEQ ID NO: 789
  Synthetic oligonucleotide

SEQ ID NO: 822 - protein, 108 aa, Artificial Sequence; identical to SEQ ID NO: 790
  Synthetic peptide

SEQ ID NO: 823 - DNA, 324 bp, Artificial Sequence
  Synthetic oligonucleotide
gacatccagatgacccagtctccatcctccctgtctgcatctgtaggagaccgtgtcaccatcacttgccgggcaagtcggatgattaatgagatgttagcgtggtaccagcagaaaccagggaaagcccctaagctcctgatcttggggccgtccagtttgcaaagtggggtcccatcacgtttcagtggcagtggatctgggacagatttcactctcaccatcagcagtctgcaacctgaagattttgctacgtactactgtgggcagttttatggtcttcctgtgacgttcggccaagggaccaaggtggaaatcaaacgg

SEQ ID NO: 824 - protein, 108 aa, Artificial Sequence
  Synthetic peptide
DIQMTQSPSSLSASVGDRVTITCRASRMINEMLAWYQQKPGKAPKLLILGPSSLQSGVPSRFSGSGSGTDFTLTISSLQPEDFATYYCGQFYGLPVTFGQGTKVEIKR

SEQ ID NO: 825 - DNA, 324 bp, Artificial Sequence
  Synthetic oligonucleotide
gacatccagatgacccagtctccatcctccctgtctgcatctgtaggagaccgtgtcaccatcacttgccgggcaagtcagcctattaggaatgccttaacttggtatcagcagaaaccagggaaagcccctaagctcctgatctataggacgtcccatttgcaaagtggggtcccatcacgtttcagtggcagtggatctgggacagatttcactcttaccatcagcagtctgcaacctgaagattttgctacgtactactgtcaacagacttggactatgcctttgacgttcggccaagggaccaaggtggaaatcaaacgg

SEQ ID NO: 826 - protein, 108 aa, Artificial Sequence
  Synthetic peptide
DIQMTQSPSSLSASVGDRVTITCRASQPIRNALTWYQQKPGKAPKLLIYRTSHLQSGVPSRFSGSGSGTDFTLTISSLQPEDFATYYCQQTWTMPLTFGQGTKVEIKR

SEQ ID NO: 827 - DNA, 324 bp, Artificial Sequence
  Synthetic oligonucleotide
gacatccagatgacccagtctccatcctccctgtctgcatctgtaggagaccgtgtcaccatcacttgccgggcaagtcaggggattggtaatcatttaagttggtatcagcagaaaccagggaaagcccctaagctcctgatctatcgtacttcctttttgcaaggtggggtcccatcacgtttcagtggcagtggatttgggacagatttcactctcaccatcagcagtctgcaacctgaagattttgctacgtactactgtcaacagttttggacgtggcctaatacgttcggccaagggaccaaggtggaaatcaaacgg

SEQ ID NO: 828 - protein, 108 aa, Artificial Sequence
  Synthetic peptide
DIQMTQSPSSLSASVGDRVTITCRASQGIGNHLSWYQQKPGKAPKLLIYRTSFLQGGVPSRFSGSGFGTDFTLTISSLQPEDFATYYCQQFWTWPNTFGQGTKVEIKR

SEQ ID NO: 829 - DNA, 324 bp, Artificial Sequence
  Synthetic oligonucleotide
gacatccagatgacccagtctccatcctccctgtctgcatctgtaggagaccgtgtcaccatcacttgccgggcaagtcagcctatttctcattatttattgtggtatcagcagaaaccagggaaagcccctaagctcctgatctataatcgttcccagttgcaaagtggggtcccatcacgtttcagtggcagtggatctgggacagatttcactctcaccatcagcagtctgcaacctgaagattttgctacgtactactgtcaacaggtgtatacgtggccttttacgttcggccaagggaccaaggtggaaatcaaacgg

SEQ ID NO: 830 - protein, 108 aa, Artificial Sequence
  Synthetic peptide
DIQMTQSPSSLSASVGDRVTITCRASQPISHYLLWYQQKPGKAPKLLIYNRSQLQSGVPSRFSGSGSGTDFTLTISSLQPEDFATYYCQQVYTWPFTFGQGTKVEIKR

SEQ ID NO: 831 - DNA, 324 bp, Artificial Sequence
  Synthetic oligonucleotide
gacatccagatgacccagtctccatcctccctgtctgcatctgtaggagaccgtgtcaccatcacttgccgggcaagtcagcagattcgtgatgagttattgtggtaccagcagaaaccagggaaagcccctaagctcctgatctattatacttccattttgcaaaatggggtcccatcacgtttcagtggcagtggatctgggacggatttcactctcaccatcagcagtctgcaacctgaagattttgctacgtactactgtcaacagaattatttgtttcctgctacgttcggccaagggaccaaggtggaaatcaaacgg

SEQ ID NO: 832 - protein, 108 aa, Artificial Sequence
  Synthetic peptide
DIQMTQSPSSLSASVGDRVTITCRASQQIRDELLWYQQKPGKAPKLLIYYTSILQNGVPSRFSGSGSGTDFTLTISSLQPEDFATYYCQQNYLFPATFGQGTKVEIKR

SEQ ID NO: 833 - DNA, 324 bp, Artificial Sequence
  Synthetic oligonucleotide
gacatccagatgacccagtctccatcctccctgtctgcatctgtaggagaccgtgtcaccatcacttgccgggcaagtcagcggattaagggtggtttagattggtatcagcagaaaccagggaaagcccctaagctcctgatctataatggttcccttttgcaaagtggggtcccatcacgtttcagtggcagtggatctgggacagatttcactctcaccatcagcagtctgcaacctgaagattttgctacgtactactgtcaacaggctactgagctgccttttacgttcggccaagggaccaaggtggaaatcaaacgg

SEQ ID NO: 834 - protein, 108 aa, Artificial Sequence
  Synthetic peptide
DIQMTQSPSSLSASVGDRVTITCRASQRIKGGLDWYQQKPGKAPKLLIYNGSLLQSGVPSRFSGSGSGTDFTLTISSLQPEDFATYYCQQATELPFTFGQGTKVEIKR

SEQ ID NO: 835 - DNA, 324 bp, Artificial Sequence
  Synthetic oligonucleotide
gacatccagatgacccagtctccatcctccctgtctgcatctgtaggagaccgtgtcaccatcacttgccgggcaagtcagtatatttttgtgcagttagcgtggtaccagcagaaaccagggaaagcccctaagctcctgatctatgatgcttccgttttgcaaagtggggtcccatcacgtttcagtggcagtggatctgggacagatttcactctcaccatcagcagtctgcaacctgaagattttgctacgtactactgtcaacagacttatatgcctcctcttacgttcggccaagggaccaaggtggaaatcaaacgg

SEQ ID NO: 836 - protein, 108 aa, Artificial Sequence
  Synthetic peptide
DIQMTQSPSSLSASVGDRVTITCRASQYIFVQLAWYQQKPGKAPKLLIYDASVLQSGVPSRFSGSGSGTDFTLTISSLQPEDFATYYCQQTYMPPLTFGQGTKVEIKR

SEQ ID NO: 837 - DNA, 324 bp, Artificial Sequence
  Synthetic oligonucleotide
gacatccagatgacccagtctccatcctccctgtctgcatctgtaggagaccgtgtcaccatcacttgccgggcaagtcagtatatttattctatgttaagttggtatcagcagaaaccagggaaagcccctaagctcctgatctattatgggtcctggttacaaagtggggtcccatcacgtttcagtggcagtggatctgggacagatttcactctcaccatcagcagtctgcaacctgaagattttgctacgtactactgtcaacagacttatttttggccttttacgttcggccaagggaccaaggtggaaatcaaacgg

SEQ ID NO: 838 - protein, 108 aa, Artificial Sequence
  Synthetic peptide
DIQMTQSPSSLSASVGDRVTITCRASQYIYSMLSWYQQKPGKAPKLLIYYGSWLQSGVPSRFSGSGSGTDFTLTISSLQPEDFATYYCQQTYFWPFTFGQGTKVEIKR

SEQ ID NO: 839 - DNA, 324 bp, Artificial Sequence
  Synthetic oligonucleotide
gacatccagatgacccagtctccatcctccctgtctgcatctgtaggagaccgtgtcaccatcacttgccgggcaagtcaggctattgggagttttttagagtggtaccagcagaaaccagggaaagcccctaagctcctgatctatcatacttccacgttgcaaagtggggtcccatcacgtttcagtggcagtggatctgggacagatttcactctcaccatcagcagtctgcaacctgaagattttgctacgtactactgtcaacagtatgcgatttggcctccgacgttcggccaagggaccaaggtggaaatcaaacgg

SEQ ID NO: 840 - protein, 108 aa, Artificial Sequence
  Synthetic peptide
DIQMTQSPSSLSASVGDRVTITCRASQAIGSFLEWYQQKPGKAPKLLIYHTSTLQSGVPSRFSGSGSGTDFTLTISSLQPEDFATYYCQQYAIWPPTFGQGTKVEIKR

SEQ ID NO: 841 - DNA, 324 bp, Artificial Sequence
  Synthetic oligonucleotide
gacatccagatgacccagtctccatcctccctgtctgcatctgtaggagaccgtgtcaccatcacttgccgggcaagtcaggcgattgggagttggttagagtggtaccagcagaaaccagggaaagcccctaagctcctgatctatcatacttccatgttgcaaagtggggtcccatcacgtttcagtggcagtggatctgggacagatttcactctcaccatcagcagtctgcaacctgaagatttcgctacgtactactgtcaacagtatgctatttggcctccgacgttcggccaagggaccaaggtggaaatcaaacgg

SEQ ID NO: 842 - protein, 108 aa, Artificial Sequence
  Synthetic peptide
DIQMTQSPSSLSASVGDRVTITCRASQAIGSWLEWYQQKPGKAPKLLIYHTSMLQSGVPSRFSGSGSGTDFTLTISSLQPEDFATYYCQQYAIWPPTFGQGTKVEIKR

SEQ ID NO: 843 - DNA, 324 bp, Artificial Sequence
  Synthetic oligonucleotide
gacatccagatgacccagtctccatcctccctgtctgcatctgtaggagaccgtgtcaccatcacttgccgggcgagtcagaagattggtccttatttaatgtggtatcagcagaaaccagggaaagcccctaagctcctgatctatcataattccactttgcaaagtggggtcccatcacgtttcagtggcagtggatctgggacagatttcactctcaccatcagcagtctgcaacctgaagattttgctacgtactactgtcaacagctttttgatatgccttttacgttcggccaagggaccaaggtggaaatcaaacgg

SEQ ID NO: 844 - protein, 108 aa, Artificial Sequence
  Synthetic peptide
DIQMTQSPSSLSASVGDRVTITCRASQKIGPYLMWYQQKPGKAPKLLIYHNSTLQSGVPSRFSGSGSGTDFTLTISSLQPEDFATYYCQQLFDMPFTFGQGTKVEIKR

SEQ ID NO: 845 - DNA, 324 bp, Artificial Sequence
  Synthetic oligonucleotide
gacatccagatgacccagtctccatcctccctgtctgcatctgtaggagaccgtgtcaccatcacttgccgggcgagtcagaatattggtccttatttactgtggtatcagcagaaaccagggaaagcccctaagctcctgatctatggggggtcctggttgcaaagtggggtcccatcacgtttcagtggcagtggatctgggacagatttcactctcaccatcagcagtctgcaacctgaagattttgctacgtactactgtcaacagacggttaagtggcctcatacgttcggccaagggaccaaggtggaaatcaaacgg

SEQ ID NO: 846 - protein, 108 aa, Artificial Sequence
  Synthetic peptide
DIQMTQSPSSLSASVGDRVTITCRASQNIGPYLLWYQQKPGKAPKLLIYGGSWLQSGVPSRFSGSGSGTDFTLTISSLQPEDFATYYCQQTVKWPHTFGQGTKVEIKR

SEQ ID NO: 847 - DNA, 324 bp, Artificial Sequence
  Synthetic oligonucleotide
gacatccagatgacccagtctccatcctccctgtctgcatctgtaggagaccgtgtcaccatcacttgccgggcaagtcaggcgattgggagttggttagagtggtaccagcagaaaccagggaaagcccctaagctcctgatctatcatacttccacgttgcaaagtggggtcccatcacgtttcagtggcagtggatctgggacagatttcactctcaccatcagcagtctgcaacctgaagatttcgctacgtactactgtcaacagtatgcgatttggcctccgacgttcggccaagggaccaaggtggaaatcaaacgg

SEQ ID NO: 848 - protein, 108 aa, Artificial Sequence
  Synthetic peptide
DIQMTQSPSSLSASVGDRVTITCRASQAIGSWLEWYQQKPGKAPKLLIYHTSTLQSGVPSRFSGSGSGTDFTLTISSLQPEDFATYYCQQYAIWPPTFGQGTKVEIKR

SEQ ID NO: 849 - DNA, 324 bp, Artificial Sequence
  Synthetic oligonucleotide
gacatccagatgacccagtctccatcctccctgcctgcatctgtaggagaccgtgtcaccatcacttgccgggcaagtcaggatattggtaggtttttactttggtaccagcagaaaccagggaaagcccctaagctcctgatctatcgtgattccatgttgcaaagtcgggtcccatcacgtttcagtggcagtggatctgggacagatttcactctcaccatcagcagtctgcaacctgaagattttgctacgtactactgtcaacaggtttatggtcttccttttacgttcggccaagggaccaaggtggaaatcaaacgg

SEQ ID NO: 850 - protein, 108 aa, Artificial Sequence
  Synthetic peptide
DIQMTQSPSSLPASVGDRVTITCRASQDIGRFLLWYQQKPGKAPKLLIYRDSMLQSRVPSRFSGSGSGTDFTLTISSLQPEDFATYYCQQVYGLPFTFGQGTKVEIKR

SEQ ID NO: 851 - DNA, 324 bp, Artificial Sequence; identical to SEQ ID NO: 755
  Synthetic peptide

SEQ ID NO: 852 - protein, 108 aa, Artificial Sequence; identical to SEQ ID NO: 756
  Synthetic peptide

SEQ ID NO: 853 - DNA, 324 bp, Artificial Sequence
  Synthetic oligonucleotide
gacatccagatgacccagtctccatcctccctgtctgcatctgtaggagaccgtgtcaccatcacttgccgggcgagtcaggagattggtccttatttaatgtggtatcagcagaaaccagggaaagcccctaagctcctgatctatcattattccactttgcaaagtggggtcccatcacgtttcagtggcagtggatctgggacagatttcactctcaccatcagcagtctgcaacctgaagattttgctacgtactactgtcaacagctttttgatatgccttttacgttcggccaagggaccaaggtggaaatcaaacgg

SEQ ID NO: 854 - protein, 108 aa, Artificial Sequence
  Synthetic peptide
DIQMTQSPSSLSASVGDRVTITCRASQEIGPYLMWYQQKPGKAPKLLIYHYSTLQSGVPSRFSGSGSGTDFTLTISSLQPEDFATYYCQQLFDMPFTFGQGTKVEIKR

SEQ ID NO: 855 - DNA, 324 bp, Artificial Sequence; identical to SEQ ID NO: 847
  Synthetic oligonucleotide

SEQ ID NO: 856 - protein, 108 aa, Artificial Sequence; identical to SEQ ID NO: 848
  Synthetic peptide

SEQ ID NO: 857 - DNA, 324 bp, Artificial Sequence
  Synthetic oligonucleotide
gacatccagatgacccagtctccatcctccctgtctgcatctgtaggagaccgtgtcaccatcacttgccgggcaagtcagcctattggtcagtggttagattggtaccagcagaaaccagggaaagcccctaagctcctgatctatgcgatttccatgttgcaaagtggggtcccatcacgtttcagtggcagtggatctgggacagatttcactctcaccatcagcagtctgcaacctgaagattttgctacgtactactgtcagcagtctcgtaagactccttttacgttcggccaagggaccaaggtggaaatcaaacgg

SEQ ID NO: 858 - protein, 108 aa, Artificial Sequence
  Synthetic peptide
DIQMTQSPSSLSASVGDRVTITCRASQPIGQWLDWYQQKPGKAPKLLIYAISMLQSGVPSRFSGSGSGTDFTLTISSLQPEDFATYYCQQSRKTPFTFGQGTKVEIKR

SEQ ID NO: 859 - DNA, 324 bp, Artificial Sequence
  Synthetic oligonucleotide
gacatccagatgacccagtctccatcctccctgtctgcatctgtaggagaccgtgtcaccatcacttgccgggcaagtcgtgatattcatggtaagttaggttggtaccagcagaaaccagggaaagcccctgagctcctgatctggggtgcttcccgtttgcaaagtggggtcccatcacgtttcagtggcagtggatctgggacagatttcactctcaccatcagcagtctgcaacctgaagattttgctacgtactactgtgggcaggttgcgtcgcggcctggtacgttcggccaagggaccaaggtggaaatcaaacgg

SEQ ID NO: 860 - protein, 108 aa, Artificial Sequence
  Synthetic peptide
DIQMTQSPSSLSASVGDRVTITCRASRDIHGKLGWYQQKPGKAPELLIWGASRLQSGVPSRFSGSGSGTDFTLTISSLQPEDFATYYCGQVASRPGTFGQGTKVEIKR

SEQ ID NO: 861 - DNA, 324 bp, Artificial Sequence
  Synthetic oligonucleotide
gacatccagatgacccagtctccatcctccctgtctgcatctgtaggagaccgtgtcaccatcacttgccgggcgagtcagaagattggtccttatttaatgtggtaccagcagaaaccagggaaagcccctaagctcctgatctatcattattccactttgcaaagtggggtcccatcacgtttcagtggcagtggatctgggacagatttcactctcaccatcagcagtctgcaacctgaagattttgctacgtactactgtcaacagctttttgatatgccttttacgttcggccaagggaccaaggtggaaatcaaacgg

SEQ ID NO: 862 - protein, 108 aa, Artificial Sequence
  Synthetic peptide
DIQMTQSPSSLSASVGDRVTITCRASQKIGPYLMWYQQKPGKAPKLLIYHYSTLQSGVPSRFSGSGSGTDFTLTISSLQPEDFATYYCQQLFDMPFTFGQGTKVEIKR

SEQ ID NO: 863 - DNA, 324 bp, Artificial Sequence
  Synthetic oligonucleotide
gacatccagatgacccagtctccatcctccctgtctgcatctgtaggagaccgtgtcaccatcacttgccgggcaagtcagactatttatcctgctttactgtggtatcagcagaaaccagggaaagcccctaagctcctgatctatggggggtcctggttgcaaagtggggtcccatcacgtttcagtggcagtggatctgggacagatttcactctcaccatcagcagtctgcaacctgaagattttgctacgtactactgtcaacagacggttaagtggcctcatacgttcggccaagggaccaaggtggaaatcaaacgg

SEQ ID NO: 864 - protein, 108 aa, Artificial Sequence
  Synthetic peptide
DIQMTQSPSSLSASVGDRVTITCRASQTIYPALLWYQQKPGKAPKLLIYGGSWLQSGVPSRFSGSGSGTDFTLTISSLQPEDFATYYCQQTVKWPHTFGQGTKVEIKR

SEQ ID NO: 865 - DNA, 324 bp, Artificial Sequence
  Synthetic oligonucleotide
gacatccagatgacccagtctccatcctacctgtctgcatctgtaggagaccgtgtcaccatcacttgccgggcaagtcagatgatttggaagaatttatcgtggtatcagcagaaaccagggaaagcccctaagctcctgatctatcgtgtgtccactttgcaaagtggggtcccatcacgtttcagtggcagtggatctgggacagatttcactctcactatcagcagtctgcaacctgaagattttgctacgtactactgtcaacagtatcagttgtcgccttttacgttcggccaagggaccaaggtggaaatcaaacgg

SEQ ID NO: 866 - protein, 108 aa, Artificial Sequence
  Synthetic peptide
DIQMTQSPSYLSASVGDRVTITCRASQMIWKNLSWYQQKPGKAPKLLIYRVSTLQSGVPSRFSGSGSGTDFTLTISSLQPEDFATYYCQQYQLSPFTFGQGTKVEIKR

SEQ ID NO: 867 - DNA, 324 bp, Artificial Sequence
  Synthetic oligonucleotide
gacatccagatgacccagtctccatcctccctgtctgcatctgtaggagaccgtgtcaccattacttgccgggcaagtcaggcgattgggcggtggttattgtggtatcagcagaaaccagggaaagcccctaagctcctgatcggtccgggttcccggttgcgaagtggggtcccatcacgtttcagtggcagtggatctgggacagatttcactctcaccatcagcagtctacaacctgaagattttgttacgtactactgtcaacaggcgtatgcctggcctccgacgttcggccaagggaccaaggtggaaatcaaacgg

SEQ ID NO: 868 - protein, 108 aa, Artificial Sequence
  Synthetic peptide
DIQMTQSPSSLSASVGDRVTITCRASQAIGRWLLWYQQKPGKAPKLLIGPGSRLRSGVPSRFSGSGSGTDFTLTISSLQPEDFVTYYCQQAYAWPPTFGQGTKVEIKR

SEQ ID NO: 869 - DNA, 324 bp, Artificial Sequence
  Synthetic oligonucleotide
gacatccagatgacccagtccccatcctccctgtctgcatctgtaggagaccgtgtcaccattacttgccgggcaagtcaggcgattgggcggtggttattgtggtatcagcagaaaccagggaaagcccctaagcacctgatcggtccgggttcccggttgcaaagtggggtcccatcacgtttcagtggcagtggatctgggacagatttcactctcaccatcagcagtctgcaacctgaagattttgctacgtactactgtcaacaggcgtatcagctgcctgtcacgttcggccaagggaccaaggtggaaatcaaacgg

SEQ ID NO: 870 - protein, 108 aa, Artificial Sequence
  Synthetic peptide
DIQMTQSPSSLSASVGDRVTITCRASQAIGRWLLWYQQKPGKAPKHLIGPGSRLQSGVPSRFSGSGSGTDFTLTISSLQPEDFATYYCQQAYQLPVTFGQGTKVEIKR

SEQ ID NO: 871 - DNA, 324 bp, Artificial Sequence
  Synthetic oligonucleotide
gacatccagatgacccagtccccatcctccctgtctgcatctgtaggagaccgtgtcaccattacttgccgggcaagtcaggcgattgggcggtggttattgtggtatcagcagaaaccagggaaagcccctaagctcctgatcggtccgggttcccggttgcaaagtggggtcccatcacgtttcagtggcagtggatctgggacagatttcactctcaccatcggcagtctgcaacctgaagattttgctacgtactactgtcaacaggcgtatagtctgcctccgacgttcggccaagggaccaaggtggaaatcaaacgg

SEQ ID NO: 872 - protein, 108 aa, Artificial Sequence
  Synthetic peptide
DIQMTQSPSSLSASVGDRVTITCRASQAIGRWLLWYQQKPGKAPKLLIGPGSRLQSGVPSRFSGSGSGTDFTLTIGSLQPEDFATYYCQQAYSLPPTFGQGTKVEIKR

SEQ ID NO: 873 - DNA, 360 bp, Artificial Sequence
  Synthetic oligonucleotide
gaggtgcagctgttggagtctgggggaggcttggtacagcctggggggtccctgcgtctctcctgtgcagcctccggattcacctttgagaagtatgcgatggcgtgggtccgccaggccccagggaagggtctggagtgggtctcacggatttcggcgaggggtgtgacgacatactacgcagactccgtgaagggccggttcaccatctcccgcgacaattccaagaacacgctgtatctgcaaatgaacagcctgcgtgctgaggacaccgcggtatattactgtgcgaaacataagcggcacgagcatactcgttttgactcctggggtcagggaaccctggtcaccgtctcgagc

SEQ ID NO: 874 - protein, 120 aa, Artificial Sequence
  Synthetic peptide
EVQLLESGGGLVQPGGSLRLSCAASGFTFEKYAMAWVRQAPGKGLEWVSRISARGVTTYYADSVKGRFTISRDNSKNTLYLQMNSLRAEDTAVYYCAKHKRHEHTRFDSWGQGTLVTVSS

SEQ ID NO: 875 - DNA, 357 bp, Artificial Sequence
  Synthetic oligonucleotide
gagttgcagctgttggagtttgggggaggcttggtacagcctggggggtccctgcgtctctcctgtacaacctccggattcaccttttcgaggtatactatgggttgggtccgccaggctccagggaagggtctagagtgggtctcagccattggcccgcccgggtcgaacacatactacgcagactccgtgaagggtcggttcaccatctcccgcgacaattccaagaacacgctgtatctgcaaatgaacagcctgcgtgccgaggacaccgcggtatattactgtgcgaaatgggtgatgttgcgggggcgctttgactactggggtcagggaaccctggtcaccgtctcgagc

SEQ ID NO: 876 - protein, 119 aa, Artificial Sequence
  Synthetic peptide
ELQLLEFGGGLVQPGGSLRLSCTTSGFTFSRYTMGWVRQAPGKGLEWVSAIGPPGSNTYYADSVKGRFTISRDNSKNTLYLQMNSLRAEDTAVYYCAKWVMLRGRFDYWGQGTLVTVSS

SEQ ID NO: 877 - DNA, 369 bp, Artificial Sequence
  Synthetic oligonucleotide
gaggtgcagctgttggagtctgggggaggcttggtacagcctggggggtccctgcgtctctcctgtgcagcctccggattcacctttgaggattatggtatggggtgggtccgccaggctccaggaaagggtctagagtgggtctcagcgattggccgcaacgggtcgcagacatactacgcagactccgtgaagggccggttcaccatctcccgcgacaattccaagaacacgctgtatctgcaaatgaacagcctgcgtgccgaggataccgcggtatattactgtgcgaaacttcggagggggcggggtctgaatacgtttacgttagactactggggtcaaggaaccctggtcaccgtctcaagc

SEQ ID NO: 878 - protein, 123 aa, Artificial Sequence
  Synthetic peptide
EVQLLESGGGLVQPGGSLRLSCAASGFTFEDYGMGWVRQAPGKGLEWVSAIGRNGSQTYYADSVKGRFTISRDNSKNTLYLQMNSLRAEDTAVYYCAKLRRGRGLNTFTLDYWGQGTLVTVSS

SEQ ID NO: 879 - DNA, 369 bp, Artificial Sequence
  Synthetic oligonucleotide
gaggtgcagctgttggagtctgggggaggcttggtacagcctggggggtccctgcgtctctcctgtgcagcctccggattcacctttggggcggccggtatggggtgggtccgccaggctccaggaaagggtctagagtgggtctcagcgattggccgcaacgggtcgcagacatactacgcagactccgtgaagggccggttcaccatctcccgcgacaattccaagaacacgctgtatctgcaaatgaacagcctgcgtgccgaggataccgcggtatattactgtgcgaaacttcggagggggcggggtctgaatacgtttacgttagactactggggtcaaggaaccctggtcaccgtctcaagc

SEQ ID NO: 880 - protein, 123 aa, Artificial Sequence
  Synthetic peptide
EVQLLESGGGLVQPGGSLRLSCAASGFTFGAAGMGWVRQAPGKGLEWVSAIGRNGSQTYYADSVKGRFTISRDNSKNTLYLQMNSLRAEDTAVYYCAKLRRGRGLNTFTLDYWGQGTLVTVSS

1. A liver targeting composition that comprises (a) a protein ligand that binds to liver hepatocytes and (b) at least one therapeutic molecule for delivery to the liver.

2. The composition according to claim 1, wherein said protein ligand (a) and said at least one therapeutic molecule (b) are present together as a single fusion or conjugate.

3. The composition according to claim 1, wherein said protein ligand (a) binds to the ASGPR receptor on hepatocytes.

4. The composition according to claim 1, wherein said protein ligand (a) is an antibody or an antibody fragment.

5. The composition according to claim 4, wherein the antibody fragment is a single immunoglobulin variable domain (dAb).

6. The composition according to claim 5, wherein the dAb is selected from: a human Vh sequence, and a human V kappa sequence.

7. The composition according to claim 1, wherein the dAb can bind to at least one ASGPR receptor chosen from: the human and/or mouse ASGPR receptor.

8. The composition according to claim 1, wherein (b) said at least one therapeutic molecule for delivery to the liver comprises a protein or peptide molecule.

9. The composition according to claim 8, wherein (b) said at least one therapeutic molecule for delivery to the liver comprises an interferon molecule or a mutant, analogue or derivative thereof, which retains interferon activity.

10. The composition according to claim 9, wherein said interferon molecule is selected from the group consisting of: interferon alpha 2, interferon alpha 5, interferon alpha 6, and consensus interferon.

11. The composition according to claim 1 wherein said dAb binds to the human and/or mouse ASGPR receptor with an affinity measured by Biacore between 1 pM and about 10 nM.

12. The composition according to claim 11, wherein the affinity of said dAb is between 1 pM and about 1 nM.

13. The composition according to any preceding claim 1, wherein said protein ligand (a) comprises a dAb amino acid sequence that binds to human ASGPR and which dAb amino acid sequence is selected from a sequence that is 100%, 95%, 90%, 85% or 80% identical to any one of the amino acid sequences identified as:
DOM26h-1 (Seq ID No: 155); DOM26h-10 (Seq ID No: 157); DOM26h-100 (Seq ID No: 159); DOM26h-101 (Seq ID No: 161); DOM26h-102 (Seq ID No: 163); DOM26h-103 (Seq ID No: 165); DOM26h-104 (Seq ID No: 167); DOM26h-105 (Seq ID No: 169); DOM26h-106 (Seq ID No: 171); DOM26h-107 (Seq ID No: 173); DOM26h-108 (Seq ID No: 175); DOM26h-109 (Seq ID No: 177); DOM26h-11 (Seq ID No: 179); DOM26h-110 (Seq ID No: 181); DOM26h-111 (Seq ID No: 183); DOM26h-112 (Seq ID No: 185); DOM26h-113 (Seq ID No: 187); DOM26h-114 (Seq ID No: 189); DOM26h-115 (Seq ID No: 191); DOM26h-116 (Seq ID No: 193); DOM26h-117 (Seq ID No: 195); DOM26h-118 (Seq ID No: 197); DOM26h-119 (Seq ID No: 199); DOM26h-12; (Seq ID No: 201) DOM26h-120 (Seq ID No: 203); DOM26h-121 (Seq ID No: 205); DOM26h-122 (Seq ID No: 207); DOM26h-123 (Seq ID No: 209); DOM26h-124; (Seq ID No: 211); DOM26h-125 (Seq ID No: 213); DOM26h-126 (Seq ID No: 215); DOM26h-127 (Seq ID No: 217); DOM26h-128 (Seq ID No: 219); DOM26h-129 (Seq ID No: 221); DOM26h-130 (Seq ID No: 223); DOM26h-131 (Seq ID No: 225); DOM26h-132 (Seq ID No: 227); DOM26h-133 (Seq ID No: 229); DOM26h-134 (Seq ID No: 231); DOM26h-135 (Seq ID No: 233); DOM26h-136 (Seq ID No: 235); DOM26h-137 (Seq ID No: 237); DOM26h-138 (Seq ID No: 239); DOM26h-139 (Seq ID No: 241); DOM26h-140 (Seq ID No: 243); DOM26h-141 (Seq ID No: 245); DOM26h-142 (Seq ID No: 247); DOM26h-143 (Seq ID No: 249); DOM26h-144 (Seq ID No: 251); DOM26h-145 (Seq ID No: 253); DOM26h-146 (Seq ID No: 255); DOM26h-147 (Seq ID No: 257); DOM26h-148 (Seq ID No: 259); DOM26h-149 (Seq ID No: 261); DOM26h-15 (Seq ID No: 263); DOM26h-150 (Seq ID No: 265); DOM26h-151 (Seq ID No: 267); DOM26h-152 (Seq ID No: 269); DOM26h-153 (Seq ID No: 271); DOM26h-154 (Seq ID No: 273); DOM26h-155 (Seq ID No: 275); DOM26h-156 (Seq ID No: 277); DOM26h-157 (Seq ID No: 279); DOM26h-158 (Seq ID No: 281); DOM26h-159 (Seq ID No: 283); DOM26h-159-1 (Seq ID No: 285); DOM26h-159-2 (Seq ID No: 287); DOM26h-159-3 (Seq ID No: 289); DOM26h-159-4 (Seq ID No: 291); DOM26h-159-5 (Seq ID No: 293); DOM26h-160 (Seq ID No: 295); DOM26h-168 (Seq ID No: 297); DOM26h-169 (Seq ID No: 299); DOM26h-17 (Seq ID No: 301); DOM26h-170 (Seq ID No: 303); DOM26h-171 (Seq ID No: 305); DOM26h-172 (Seq ID No: 307); DOM26h-173 (Seq ID No: 309); DOM26h-174 (Seq ID No: 311); DOM26h-175 (Seq ID No: 313); DOM26h-176 (Seq ID No: 315); DOM26h-177 (Seq ID No: 317); DOM26h-178 (Seq ID No: 319); DOM26h-179 (Seq ID No: 321); DOM26h-180 (Seq ID No: 323); DOM26h-181 (Seq ID No: 325); DOM26h-182 (Seq ID No: 327); DOM26h-183 (Seq ID No: 329); DOM26h-184 (Seq ID No: 331); DOM26h-185 (Seq ID No: 333); DOM26h-186 (Seq ID No: 335); DOM26h-187 (Seq ID No: 337); DOM26h-188 (Seq ID No: 339); DOM26h-189 (Seq ID No: 341); DOM26h-19 (Seq ID No: 343); DOM26h-190 (Seq ID No: 345); DOM26h-191 (Seq ID No: 347); DOM26h-192 (Seq ID No: 349); DOM26h-193 (Seq ID No: 351); DOM26h-194 (Seq ID No: 353); DOM26h-195 (Seq ID No: 355); DOM26h-196 (Seq ID No: 357); DOM26h-197 (Seq ID No: 359); DOM26h-198 (Seq ID No: 361); DOM26h-199 (Seq ID No: 363); DOM26h-2 (Seq ID No: 365); DOM26h-20 (Seq ID No: 367); DOM26h-200 (Seq ID No: 369); DOM26h-201 (Seq ID No: 371); DOM26h-202 (Seq ID No: 373); DOM26h-203 (Seq ID No: 375); DOM26h-204 (Seq ID No: 377); DOM26h-205 (Seq ID No: 379); DOM26h-206 (Seq ID No: 381); DOM26h-207 (Seq ID No: 383); DOM26h-208 (Seq ID No: 385); DOM26h-209 (Seq ID No: 387); DOM26h-21 (Seq ID No: 389); DOM26h-210 (Seq ID No: 391); DOM26h-211 (Seq ID No: 393); DOM26h-212 (Seq ID No: 395); DOM26h-213 (Seq ID No: 397); DOM26h-214 (Seq ID No: 399); DOM26h-215 (Seq ID No: 401); DOM26h-216 (Seq ID No: 403); DOM26h-217 (Seq ID No: 405); DOM26h-218 (Seq ID No: 407); DOM26h-219 (Seq ID No: 409); DOM26h-22 (Seq ID No: 411); DOM26h-220 (Seq ID No: 413); DOM26h-221 (Seq ID No: 415); DOM26h-222 (Seq ID No: 417); DOM26h-223 (Seq ID No: 419); DOM26h-23 (Seq ID No: 421); DOM26h-24 (Seq ID No: 423); DOM26h-29-1 (Seq ID No: 425); DOM26h-4 (Seq ID No: 427); DOM26h-41 (Seq ID No: 429); DOM26h-42 (Seq ID No: 431); DOM26h-43 (Seq ID No: 433); DOM26h-44 (Seq ID No: 435); DOM26h-45 (Seq ID No: 437); DOM26h-46 (Seq ID No: 439); DOM26h-47 (Seq ID No: 441); DOM26h-48 (Seq ID No: 443); DOM26h-49 (Seq ID No: 445); DOM26h-50 (Seq ID No: 447); DOM26h-51 (Seq ID No: 449); DOM26h-52 (Seq ID No: 451); DOM26h-53 (Seq ID No: 453); DOM26h-54 (Seq ID No: 455); DOM26h-55 (Seq ID No: 457); DOM26h-56 (Seq ID No: 459); DOM26h-57 (Seq ID No: 461); DOM26h-58 (Seq ID No: 463); DOM26h-59 (Seq ID No: 465); DOM26h-60 (Seq ID No: 467); DOM26h-61 (Seq ID No: 469); DOM26h-62 (Seq ID No: 471); DOM26h-63 (Seq ID No: 473); DOM26h-64 (Seq ID No: 475); DOM26h-65 (Seq ID No: 477); DOM26h-66 (Seq ID No: 479); DOM26h-67 (Seq ID No: 481); DOM26h-68 (Seq ID No: 483); DOM26h-69 (Seq ID No: 485); DOM26h-70 (Seq ID No: 487); DOM26h-71 (Seq ID No: 489); DOM26h-72 (Seq ID No: 491); DOM26h-73 (Seq ID No: 493); DOM26h-74 (Seq ID No: 495); DOM26h-75 (Seq ID No: 497); DOM26h-76 (Seq ID No: 499); DOM26h-77 (Seq ID No: 501); DOM26h-78 (Seq ID No: 503); DOM26h-79 (Seq ID No: 505); DOM26h-80 (Seq ID No: 507); DOM26h-81 (Seq ID No: 509); DOM26h-82 (Seq ID No: 511); DOM26h-83 (Seq ID No: 513); DOM26h-84 (Seq ID No: 515); DOM26h-85 (Seq ID No: 517); DOM26h-86 (Seq ID No: 519); DOM26h-87 (Seq ID No: 521); DOM26h-88 (Seq ID No: 523); DOM26h-89 (Seq ID No: 525); DOM26h-90 (Seq ID No: 527); DOM26h-91 (Seq ID No: 529); DOM26h-92 (Seq ID No: 531); DOM26h-93 (Seq ID No: 533); DOM26h-94 (Seq ID No: 535); DOM26h-95 (Seq ID No: 537); DOM26h-96 (Seq ID No: 539); DOM26h-97 (Seq ID No: 541); DOM26h-98 (Seq ID No: 543); DOM26h-99 (Seq ID No: 545); DOM26h-99-1 (Seq ID No: 547); DOM26h-99-2 (Seq ID No: 549); DOM26h-161 (Seq ID No: 551); DOM26h-162 (Seq ID No: 553); DOM26h-163 (Seq ID No: 555); DOM26h-164 (Seq ID No: 557); DOM26h-165 (Seq ID No: 559); DOM26h-166 (Seq ID No: 561); DOM26h-167 (Seq ID No: 563); DOM26h-224 (Seq ID No: 565); DOM26h-25 (Seq ID No: 567); DOM26h-26 (Seq ID No: 569); DOM26h-27 (Seq ID No: 571); DOM26h-28 (Seq ID No: 573); DOM26h-29 (Seq ID No: 575); DOM26h-30 (Seq ID No: 577); DOM26h-31 (Seq ID No: 579); DOM26h-32 (Seq ID No: 581); DOM26h-33 (Seq ID No: 583); DOM26h-34 (Seq ID No: 585); DOM26h-35 (Seq ID No: 587); DOM26h-36 (Seq ID No: 589); DOM26h-37 (Seq ID No: 591); DOM26h-38 (Seq ID No: 593); DOM26h-39 (Seq ID No: 595); DOM26h-40 (Seq ID No: 597); DOM26h-6 (Seq ID No: 599); DOM26h-8 (Seq ID No: 601); DOM26h-9 (Seq ID No: 603).

14. The composition according to claim 1, wherein said protein ligand (a) comprises a dAb amino acid sequence that binds to human ASGPR and wherein said dAb amino acid sequence is selected from a sequence that is 100%, 95%, 90%, 85% or 80% identical to the amino acid encoded by the nucleotide sequence identified as DOM26h-161-84 (Seq ID No: 867); DOM26h-161-86 (Seq ID No: 869); DOM26H-161-87 (Seq ID No: 871); DOM26h-196-61 (Seq ID No: 873); DOM26h-210-2 (Seq ID No: 875); DOM26h-220-1 (Seq ID No: 877); or DOM26h-220-43 (Seq ID No: 879).

15. The composition wherein said protein ligand (a) comprises a dAb amino acid sequence that competes for binding to human ASGPR with any one of the amino acid sequences of claims 13.

16. The composition according to claim 1, wherein said protein ligand (a) comprises a dAb amino acid sequence that binds to mouse ASGPR and which is selected from a sequence that is 100%, 95%, 90%, 85% or 80% identical to the amino acid encoded by the nucleotide sequences identified as:
DOM26m-10 (Seq ID No: 605); DOM26m-13 (Seq ID No: 607); DOM26m-16 (Seq ID No: 609); DOM26m-165 (Seq ID No: 611); DOM26m-17 (Seq ID No: 613); DOM26m-27 (Seq ID No: 615); DOM26m-28 (Seq ID No: 617); DOM26m-29 (Seq ID No: 619); DOM26m-30 (Seq ID No: 621); DOM26m-31 (Seq ID No: 623); DOM26m-32 (Seq ID No: 625); DOM26m-33 (Seq ID No: 627); DOM26m-33-1 (Seq ID No: 629); DOM26m-33-10 (Seq ID No: 631); DOM26m-33-11 (Seq ID No: 633); DOM26m-33-12 (Seq ID No: 635); DOM26m-33-2 (Seq ID No: 637); DOM26m-33-3 (Seq ID No: 639); DOM26m-33-4 (Seq ID No: 641); DOM26m-33-5 (Seq ID No: 643); DOM26m-33-6 (Seq ID No: 645); DOM26m-33-7 (Seq ID No: 647); DOM26m-33-8 (Seq ID No: 649); DOM26m-33-9 (Seq ID No: 651); DOM26m-34 (Seq ID No: 653); DOM26m-35 (Seq ID No: 655); DOM26m-36 (Seq ID No: 657); DOM26m-37 (Seq ID No: 659); DOM26m-38 (Seq ID No: 661); DOM26m-39 (Seq ID No: 663); DOM26m-4 (Seq ID No: 665); DOM26m-40 (Seq ID No: 667); DOM26m-41 (Seq ID No: 669); DOM26m-42 (Seq ID No: 671); DOM26m-43 (Seq ID No: 673); DOM26m-44 (Seq ID No: 675); DOM26m-45 (Seq ID No: 677); DOM26m-46 (Seq ID No: 679); DOM26m-47 (Seq ID No: 681); DOM26m-48 (Seq ID No: 683); DOM26m-52 (Seq ID No: 685); DOM26m-52-1 (Seq ID No: 687); DOM26m-52-2 (Seq ID No: 689); DOM26m-52-3 (Seq ID No: 691); DOM26m-52-4 (Seq ID No: 693); DOM26m-52-5 (Seq ID No: 695); DOM26m-52-6 (Seq ID No: 697); DOM26m-52-7 (Seq ID No: 699); DOM26m-6 (Seq ID No: 701); DOM26m-60 (Seq ID No: 703); DOM26m-61-1 (Seq ID No: 705); DOM26m-61-2 (Seq ID No: 707); DOM26m-61-3 (Seq ID No: 709); DOM26m-61-4 (Seq ID No: 711); DOM26m-61-5 (Seq ID No: 713); DOM26m-61-6 (Seq ID No: 715); DOM26m-7 (Seq ID No: 717); DOM26m-73 (Seq ID No: 719); DOM26m-74 (Seq ID No: 721); DOM26m-75 (Seq ID No: 723); DOM26m-76 (Seq ID No: 725); DOM26m-77 (Seq ID No: 727); DOM26m-78 (Seq ID No: 729); DOM26m-79 (Seq ID No: 731); DOM26m-8 (Seq ID No: 733); DOM26m-80 (Seq ID No: 735); DOM26m-81 (Seq ID No: 737); DOM26m-82 (Seq ID No: 739); DOM26m-83 (Seq ID No: 741); DOM26m-9 (Seq ID No: 743); DOM26m-1 (Seq ID No: 745); DOM26m-100 (Seq ID No: 747); DOM26m-101 (Seq ID No: 749); DOM26m-102 (Seq ID No: 751); DOM26m-103 (Seq ID No: 753); DOM26m-106 (Seq ID No: 755); DOM26m-108 (Seq ID No: 757); DOM26m-109 (Seq ID No: 759); DOM26m-109-1 (Seq ID No: 761); DOM26m-109-2 (Seq ID No: 763); DOM26m-12 (Seq ID No: 765); DOM26m-18 (Seq ID No: 767); DOM26m-19 (Seq ID No: 769); DOM 26m-2 (Seq ID No: 771); DOM26m-20 (Seq ID No: 773); DOM26m-20-1 (Seq ID No: 775); DOM26m-20-2 (Seq ID No: 777); DOM26m-20-3 (Seq ID No: 779); DOM26m-20-4 (Seq ID No: 781); DOM26m-20-5 (Seq ID No: 783); DOM26m-20-6 (Seq ID No: 785); DOM26m-22 (Seq ID No: 787); DOM26m-23 (Seq ID No: 789); DOM26m-24 (Seq ID No: 791); DOM26m-25 (Seq ID No: 793); DOM26m-26 (Seq ID No: 795); DOM26m-3 (Seq ID No: 797); DOM26m-50 (Seq ID No: 799); DOM26m-50-1 (Seq ID No: 801); DOM26m-50-2 (Seq ID No: 803); DOM26m-50-3 (Seq ID No: 805); DOM26m-50-4 (Seq ID No: 807); DOM26m-50-5 (Seq ID No: 809); DOM26m-50-6 (Seq ID No: 811); DOM26m-51 (Seq ID No: 813); DOM26m-53 (Seq ID No: 815); DOM26m-54 (Seq ID No: 817); DOM26m-55 (Seq ID No: 819); DOM26m-56 (Seq ID No: 821); DOM26m-57 (Seq ID No: 823); DOM26m-58 (Seq ID No: 825); DOM26m-59 (Seq ID No: 827); DOM26m-61 (Seq ID No: 829); DOM26m-63 (Seq ID No: 831); DOM26m-64 (Seq ID No: 833); DOM26m-66 (Seq ID No: 835); DOM26m-69 (Seq ID No: 837); DOM26m-85 (Seq ID No: 839); DOM26m-86 (Seq ID No: 841); DOM26m-87 (Seq ID No: 843); DOM26m-89 (Seq ID No: 845); DOM26m-90 (Seq ID No: 847); DOM26m-91 (Seq ID No: 849); DOM26m-92 (Seq ID No: 851); DOM26m-93 (Seq ID No: 853); DOM26m-94 (Seq ID No: 855); DOM26m-95 (Seq ID No: 857); DOM26m-96 (Seq ID No: 859); DOM26m-97 (Seq ID No: 861); DOM26m-98 (Seq ID No: 863); DOM26m-99 (Seq ID No: 865).

17. The composition according to claim 1, wherein said protein ligand (a) comprises a dAb amino acid sequence that competes for binding to human ASGPR with any one of the amino acid sequences of claim 16.

18. The composition according to claim 1, wherein said protein ligand (a) comprises a dAb amino acid sequence that comprises at least one CDR selected from: CDR1, CDR2, and CDR3, wherein the CDR1, CDR2, or CDR3 is at least 80% identical to a CDR1, CDR2, or CDR3 sequence in any one of the sequences of claim 13, 14 or 16.

19. The composition according to claims 1, wherein an amino acid or chemical linker is present.

20. The composition according to claim 19, wherein the linker is selected from: a TVAAPS linker, a TVAAPR linker, a helical linker, a gly-ser linker, and a PEG linker.

21. The composition according to claim 1, wherein said at least one therapeutic molecule (b) is present at the N-terminal of said dAb.

22. The pharmaceutical composition comprising a liver targeting composition according to claim 1 in combination with a pharmaceutically or physiologically acceptable carrier, excipient or diluent.

23. The pharmaceutical composition according to claim 22, which comprises further therapeutic or active agents.

24. A composition that comprises (a) a liver targeting composition according to claim 1 and (b) further therapeutic or active agents, for separate, sequential or concurrent administration to a subject.

25. A dAb amino acid sequence that binds to human ASGPR and wherein said dAb amino acid sequence is selected from a sequence that is 100%, 95%, 90%, 85% or 80% identical to any one of the amino acid sequences identified as:
DOM26h-1; DOM26h-10, DOM26h-100; DOM26h-101; DOM26h-102; DOM26h-103; DOM26h-104; DOM26h-105; DOM26h-106; DOM26h-107; DOM26h-108; DOM26h-109; DOM26h-11; DOM26h-110; DOM26h-111; DOM26h-112; DOM26h-113; DOM26h-114; DOM26h-115; DOM26h-116; DOM26h-117; DOM26h-118; DOM26h-119; DOM26h-12; DOM26h-120; DOM26h-121; DOM26h-122; DOM26h-123; DOM26h-124; DOM26h-125; DOM26h-126; DOM26h-127 ; DOM26h-128; DOM26h-129; DOM26h-130; DOM26h-131; DOM26h-132; DOM26h-133; DOM26h-134; DOM26h-135; DOM26h-136; DOM26h-137; DOM26h-138; DOM26h-139; DOM26h-140; DOM26h-141; DOM26h-142; DOM26h-143; DOM26h-144; DOM26h-145; DOM26h-146; DOM26h-147; DOM26h-148; DOM26h-149; DOM26h-15; DOM26h-150; DOM26h-151; DOM26h-152; DOM26h-153; DOM26h-154; DOM26h-155; DOM26h-156; DOM26h-157; DOM26h-158; DOM26h-159; DOM26h-159-1; DOM26h-159-2; DOM26h-159-3; DOM26h-159-4; DOM26h-159-5; DOM26h-160; DOM26h-168; DOM26h-169; DOM26h-17; DOM26h-170; DOM26h-171; DOM26h-172; DOM26h-173; DOM26h-174; DOM26h-175; DOM26h-176; DOM26h-177; DOM26h-178; DOM26h-179; DOM26h-180; DOM26h-181; DOM26h-182; DOM26h-183; DOM26h-184; DOM26h-185; DOM26h-186; DOM26h-187; DOM26h-188; DOM26h-189; DOM26h-19; DOM26h-190; DOM26h-191; DOM26h-192; DOM26h-193; DOM26h-194; DOM26h-195; DOM26h-196; DOM26h-197; DOM26h-198; DOM26h-199; DOM26h-2; DOM26h-20; DOM26h-200; DOM26h-201; DOM26h-202; DOM26h-203; DOM26h-204; DOM26h-205; DOM26h-206; DOM26h-207; DOM26h-208; DOM26h-209; DOM26h-21; DOM26h-210; DOM26h-211; DOM26h-212; DOM26h-213; DOM26h-214; DOM26h-215; DOM26h-216; DOM26h-217; DOM26h-218; DOM26h-219; DOM26h-22; DOM26h-220; DOM26h-221; DOM26h-222; DOM26h-223; DOM26h-23; DOM26h-24; DOM26h-29-1; DOM26h-4; DOM26h-41; DOM26h-42; DOM26h-43; DOM26h-44; DOM26h-45; DOM26h-46; DOM26h-47; DOM26h-48; DOM26h-49; DOM26h-50; DOM26h-51; DOM26h-52; DOM26h-53; DOM26h-54; DOM26h-55; DOM26h-56; DOM26h-57; DOM26h-58; DOM26h-59; DOM26h-60; DOM26h-61; DOM26h-62; DOM26h-63; DOM26h-64; DOM26h-65; DOM26h-66; DOM26h-67; DOM26h-68; DOM26h-69; DOM26h-70; DOM26h-71; DOM26h-72; DOM26h-73; DOM26h-74; DOM26h-75; DOM26h-76; DOM26h-77; DOM26h-78; DOM26h-79; DOM26h-80; DOM26h-81; DOM26h-82; DOM26h-83; DOM26h-84; DOM26h-85; DOM26h-86; DOM26h-87; DOM26h-88; DOM26h-89; DOM26h-90; DOM26h-91; DOM26h-92; DOM26h-93; DOM26h-94; DOM26h-95; DOM26h-96; DOM26h-97; DOM26h-98; DOM26h-99; DOM26h-99-1; DOM26h-99-2; DOM26h-161 ; DOM26h-162; DOM26h-163; DOM26h-164; DOM26h-165; DOM26h-166; DOM26h-167; DOM26h-224 ; DOM26h-25; DOM26h-26; DOM26h-27; DOM26h-28; DOM26h-29 ; DOM26h-30; DOM26h-31; DOM26h-32; DOM26h-33; DOM26h-34; DOM26h-35; DOM26h-36; DOM26h-37; DOM26h-38; DOM26h-39; DOM26h-40; DOM26h-6; DOM26h-8; DOM26h-9.

26. A dAb amino acid sequence that binds to human ASGPR and wherein said dAb amino acid sequence is selected from a sequence that is 100%, 95%, 85%, or 80% identical to the amino acid sequence identified as: DOM26h-161-84; DOM26h-161-86; DOM26h-161-87; DOM26h-196-61; DOM26h-210-2; DOM26h-220-1; or DOM26h-220-43.

27. A dAb amino acid sequence that competes for binding to human ASGPR with any one of the amino acid sequences of claim 25.

28. A dAb amino acid sequence that binds to mouse ASGPR and wherein said dAb amino acid sequence is selected from a sequence that is 100%, 95%, 90%, 85% or 80% identical to any one of the amino acid sequences identified as:
DOM26m-10; DOM26m-13; DOM26m-16; DOM26m-165; DOM26m-17; DOM26m-27; DOM26m-28; DOM26m-29; DOM26m-30; DOM26m-31; DOM26m-32; DOM26m-33; DOM26m-33-1; DOM26m-33-10; DOM26m-33-11; DOM26m-33-12; DOM26m-33-2; DOM26m-33-3; DOM26m-33-4; DOM26m-33-5; DOM26m-33-6; DOM26m-33-7; DOM26m-33-8; DOM26m-33-9; DOM26m-34; DOM26m-35; DOM26m-36; DOM26m-37; DOM26m-38; DOM26m-39; DOM26m-4; DOM26m-40; DOM26m-41; DOM26m-42; DOM26m-43; DOM26m-44; DOM26m-45; DOM26m-46; DOM26m-47; DOM26m-48; DOM26m-52; DOM26m-52-1; DOM26m-52-2; DOM26m-52-3; DOM26m-52-4; DOM26m-52-5; DOM26m-52-6; DOM26m-52-7; DOM26m-6; DOM26m-60; DOM26m-61-1 ; DOM26m-61-2; DOM26m-61-3; DOM26m-61-4; DOM26m-61-5; DOM26m-61-6; DOM26m-7; DOM26m-73; DOM26m-74; DOM26m-75; DOM26m-76; DOM26m-77; DOM26m-78; DOM26m-79; DOM26m-8; DOM26m-80; DOM26m-81; DOM26m-82; DOM26m-83; DOM26m-9; DOM26m-1; DOM26m-100; DOM26m-101; DOM26m-102; DOM26m-103; DOM26m-106; DOM26m-108; DOM26m-109; DOM26m-109-1; DOM26m-109-2; DOM26m-12; DOM26m-18; DOM26m-19; DOM26m-20; DOM26m-20-1; DOM26m-20-2; DOM26m-20-3; DOM26m-20-4; DOM26m-20-5; DOM26m-20-6; DOM26m-22 ; DOM26m-23; DOM26m-24; DOM26m-25; DOM26m-26; DOM26m-3 ; DOM26m-50; DOM26m-50-1; DOM26m-50-2; DOM26m-50-3; DOM26m-50-4; DOM26m-50-5; DOM26m-50-6; DOM26m-51; DOM26m-53; DOM26m-54; DOM26m-55; DOM26m-56; DOM26m-57; DOM26m-58; DOM26m-59; DOM26m-61; DOM26m-63; DOM26m-64; DOM26m-66; DOM26m-69; DOM26m-85; DOM26m-86; DOM26m-87; DOM26m-89; DOM26m-90; DOM26m-91; DOM26m-92; DOM26m-93; DOM26m-94; DOM26m-95; DOM26m-96; DOM26m-97; DOM26m-98; DOM26m-99.

29. A dAb amino acid sequence that competes for binding to mouse ASGPR with any one of the amino acid sequences of claim 28.

30. A dAb amino acid sequence according to claim 25, which cross-reacts with mouse and human ASGPR.

31. A dAb amino acid sequence according to any one of claim 25, wherein said dAb amino acid sequence comprises at least one CDR selected from the group consisting of: CDR1, CDR2, and CDR3, wherein the CDR1, CDR2, or CDR3 is 100%, 95%, 90%, 85% or 80% identical to a CDR1, CDR2, or CDR3 sequence in any one of the sequences of claims 25.

32. A composition according to claims 1 for use in medicine.

33. A method of treating or preventing at least one liver disease or disorder or condition by administering to a subject a therapeutically or prophylactically effective amount of a ccomposition according to claim 1.

34. The method of claim 33, wherein said at least one liver disease or disorder or condition is selected from: an inflammatory liver disease, a viral liver disease, cirrhosis and liver cancer.

35. The method according to claim 34, wherein said at least one liver disease is selected from: Hepatitis B and Hepatitis C and the inflammatory liver disease is fibrosis.

36. A method of treating or preventing at least one liver disease or disorder or condition by administering to a subject a therapeutically or prophylactically effective amount of a composition according to of a composition according to claim 1.

37. The method according to claim 36, wherein said at least one liver disease or disorder or condition is selected from: a viral liver disease, cirrhosis and liver cancer.

38. The method according to claim 37, wherein said at least one viral liver disease is selected from: Hepatitis B and Hepatitis C.

39. The method according to claim 33, wherein said composition is delivered to a subject by subcutaneous, intravenous or intramuscular injection.

40. The method as claimed in claim 33 wherein said composition is delivered to the subject via parenteral, oral, rectal, transmucosal, ocular, pulmonary or GI tract delivery.

41. An injectable, oral, inhalable or nebulisable formulation which comprises a composition according to claim 1.

42. A sustained release formulation which comprises a composition according to claim 1.

43. A freeze dried formulation which comprises a composition according to claim 1.

44. A delivery device comprising a composition according to claim 1.

45. An isolated or recombinant nucleic acid encoding a dAb that binds to the ASGPR receptor on hepatocytes wherein said nucleotide sequence is selected from a sequence that is 100%, 95%, 90%, 85% or 80% identical to any one of the DOM 26 nucleic acid sequences shown in FIG. 13, 14 , 17, 18 or 32.

46. A vector comprising a nucleic acid of claim 45.

47. A host cell comprising the nucleic acid of claim 45.

48. A method of producing a fusion polypeptide comprising (a) a dAb that binds to ASGPR receptor on hepatocytes and also (b) at least one therapeutic molecule for delivery to the liver, wherein said method comprises maintaining a host cell of claim 47 under conditions suitable for expression of said nucleic acid or vector, whereby a fusion polypeptide is produced.
